(19) United States
(12) Patent Application Publication
(10) Pub. No.: US 2005/0037439 A1
(43) Pub. Date: Feb. 17, 2005

(54) Differentially expressed genes involved in cancer, the polypeptides encoded thereby, and methods of using the same

(76) Inventors: Maureen J. Bourner, O'Fallon, MO (US); Paul J. Hippenmeyer, Chesterfield, MO (US); Richard D. Head, Florissant, MO (US); Richard A. Mazzarella, Webster Groves, MO (US); Nicholas R. Staten, Kirkwood, MO (US); Barbara K. Klein, Town and Country, MO (US)

Correspondence Address: HARNESS, DICKEY & PIERCE, P.L.C., 7700 BONHOMME, SUITE 400, ST LOUIS, MO, 63105, US

(21) Appl. No.: 10/696,639

(22) Filed: Oct. 29, 2003

Related U.S. Application Data
(60) Provisional application No. 60/422,176, filed on Oct. 29, 2002.

(51) Int. Cl. G01N 33/53; G01N 33/567; G01N 33/574; C07K 16/18

(52) U.S. Cl. 435/7.2; 530/388.25

(57) ABSTRACT

The invention relates nucleic acids and their encoded polypeptides, whose expression is modulated in cancer or tumor cells. The invention further relates to methods useful for treating or modulating cancer or tumors in mammals in need of such biological effect. This includes the diagnosis and treatment of oncological disorders. Additionally, the present invention further relates to the use of antibodies against the polypeptides of the present invention as diagnostic probes or as therapeutic agents as well as the use of polynucleotide sequences encoding the polypeptides of the present invention as diagnostic probes or therapeutic agents for the treatment of a broad range of pathological states.

[0001] The present application claims priority under Title 35, United States Code, §119 to U.S. Provisional application Ser. No. 60/422,176, filed Oct. 29, 2002, which is incorporated by reference in its entirety as if written herein.

[0002] The present application contains a sequence listing in computer readable form under Title 37, § 1.53 (e)(5) entitiled 01040_{—}1.ST25.txt (created Oct. 24, 2003, 2,345 KB), which is incorporated by reference in its entirety as if written herein.

### FIELD OF THE INVENTION

[0003] The invention relates generally to the identification of nucleic acids and their encoded polypeptides, whose expression is modulated in cancer or tumor cells. These nucleic acids and proteins may not have previously been identified as having a biological role in cancer. The invention further relates to methods useful for treating or modulating cancer or tumors in mammals in need of such biological effect. This includes the diagnosis and treatment of oncological disorders. Additionally, the present invention further relates to the use of antibodies against the polypeptides of the present invention as diagnostic probes or as therapeutic agents as well as the use of polynucleotide sequences encoding the polypeptides of the present invention as diagnostic probes or therapeutic agents for the treatment of a broad range of pathological states. The present invention also relates to antisense molecules.

### BACKGROUND OF THE INVENTION

[0004] Cancer Background

[0005] The present invention relates to methods and compositions for the diagnosis, prevention, and treatment of neoplastic cell growth and proliferation, i.e., tumors and cancers (e.g., colon cancer) in mammals, for example, humans. Specifically, genes which are differentially expressed in tumor cells relative to normal cells are identified. Among these are certain Incyte (Palo Alto, Calif.) unique genes.

[0006] Malignant tumors, i.e., cancers, are the second leading cause of death in the United States, after heart disease (Boring, et al., CA Cancer J. Clin., 43:7, 1993), and develop in one in three Americans. One of every four Americans dies of cancer. Cancer is characterized primarily by an increase in the number of abnormal, or neoplastic, cells derived from a normal tissue which proliferate to form a tumor mass, the invasion of adjacent tissues by these neoplastic tumor cells, and the generation of malignant cells which spread via the blood or lymphatic system to regional lymph nodes and to distant sites. The latter progression to malignancy is referred to as metastasis.

[0007] Cancer can result from a breakdown in the communication between neoplastic cells and their environment, including their normal neighboring cells. Signals, both growth-stimulatory and growth-inhibitory, are routinely exchanged between cells within a tissue. Normally, cells do not divide in the absence of stimulatory signals, and, likewise, will cease dividing in the presence of inhibitory signals. In a cancerous, or neoplastic, state, a cell acquires the ability to “override” these signals and to proliferate under conditions in which normal cells would not grow.

[0008] Tumor cells must acquire a number of distinct aberrant traits to proliferate. Reflecting this requirement is the fact that the genomes of certain well-studied tumors carry several different independently altered genes, including activated oncogenes and inactivated tumor suppressor genes. Differential expression of the following suppressor genes has been demonstrated in human cancers: a retinoblastoma gene, RB; the Wilms' tumor gene, WT1 (11p); a gene deleted in colon carcinoma, DCC (18q); the neurofibromatosis type 1 gene, NF1 (17q); and a gene involved in familial adenomatous polyposis coli, APC (5q) (Vogelstein, B. and Kinzler, K. W., Trends Genet., 9:138-141, 1993). Each of these genetic changes appears to be responsible for imparting some of the traits that, in aggregate, represent the full neoplastic phenotype (Hanahan. D. and Weinberg, R. A., Cell, 100:57-70, 2000).

[0009] Colon cancer is the second leading cause of cancer-related deaths in the United States. The American Cancer Society estimates that there will be approximately 94,700 new cases of colon cancer in the United States in 1999, and that colon cancer will be responsible for about 47,900 deaths. Colon cancer frequently metastasizes to the liver and the lung.

[0010] Unlike lung cancer, in which smoking has been identified as the prime etiologic factor responsible for the disease, the principle mechanisms underlying colon cancer are complex and incompletely understood. Dietary factors are believed to promote carcinogenesis, especially a high fat intake. At the molecular level, a multistep process involving a number of mutations is suspected in the progression of adenomas to colon tumors (Vogelstein et al. (1988) N. Engl. J. Med. 319:525-532). The development and progression of colon cancer is driven by sequential mutations in three gene types: oncogenes, tumor suppressor genes and mismatch repair genes, which control the rate of mutations of other genes, including oncogenes and tumor suppressor genes. These mutations occur as a result of genetic predisposition (germline mutations) or in response to environmental factors (somatic mutations).

[0011] Several mutations that are associated with colon cancer have been identified. Germline mutations that have been linked to hereditary, or familial, colon cancer include the tumor suppressor gene adenomatous polyposis coli (APC (Lengauer et al. (1991) Science 253:665-669) and the mismatch-repair genes MutL and MutS (Modrich (1995) Phil. Trans. R. Soc. Lond. B 347:89-95; Kolodner (1996) Genes Dev. 10: 1433-1442). Defective APC has been implicated in familial adenomatous polyposis (FAP) and MutL and MutS in hereditary nonpolyposis colorectal cancer (HNPCC). Somatic mutations identified in association with sporadic colon cancer include the oncogenes K-ras, c-myc, and the tumor suppressor genes p53, APC, neurofibromatosis type I GTPase-activating protein (NF I GAP), deleted in colon cancer (DCC and mutated in colon cancer (MCC) (Midgley et al. (1999) Lancet 353:391-399).

[0012] Conventional therapeutic approaches to treat colon cancer include surgical resection, radiation and chemotherapy, including adjuvant therapy. Gene therapeutic approaches include transfer of cytokine or immune antigen genes, transfer of enzyme-prodrug systems (see, e.g., Huber et al. (1993) Cancer Res. 53:4619-4626) and replacement of tumor suppressor genes (see, e.g., Venook et al. (1998) Proc. ASCO 17:43 1 a) using viral vectors (Zwacka et al. (1998) Hematol. Oncol. Chn. North Am. 12:595 615).

[0013] While several genes associated with colon cancer have been identified, identification of additional genes linked to development (or inhibition of development) of colon cancer can provide additional diagnostic tools and therapeutic targets. Identification of genes differentially expressed in colon cancer is particularly important in the advancement of drug discovery, diagnostic technologies, and the understanding of the progression and nature of colon cancer. The invention provides for identification of such differentially expressed genes.

[0014] Microarrray Background

[0015] DNA-based arrays can provide an efficient, high-throughput method to examine gene expression and genetic variability. For example, SNPs, or single nucleotide polymorphisms, are the most common type of human genetic variation. DNA-based arrays can dramatically accelerate the discovery of SNPs in hundreds and even thousands of genes. Likewise, such arrays can be used for SNP genotyping in which DNA samples from individuals or populations are assayed for the presence of selected SNPs. These approaches will ultimately lead to the systematic identification of all genetic variations in the human genome and the correlation of certain genetic variations with disease susceptibility, responsiveness to drug treatments, and other medically relevant information. (See, for example, Wang, D. G. et al. (1998) Science 280:1077-1082.)

[0016] DNA-based array technology is especially important for the rapid analysis of global gene expression patterns. For example, genetic predisposition, disease, or therapeutic treatment may directly or indirectly affect the expression of a large number of genes in a given tissue. In this case, it is useful to develop a profile, or transcript image, of all the genes that are expressed and the levels at which they are expressed in that particular tissue. A profile generated from an individual or population affected with a certain disease or undergoing a particular therapy may be compared with a profile likewise generated from a control individual or population. Such analysis does not require knowledge of gene function, as the expression profiles can subjected to mathematical analyses which simply treat each gene as a marker. Furthermore, gene expression profiles may help dissect biological pathways by identifying all the genes expressed, for example, at a certain developmental stage, in a particular tissue, or in response to disease or treatment. (See, for example, Lander, E. S. et al. (1996) Science 274:536-539.)

### SUMMARY OF THE INVENTION

[0017] In one aspect, the invention involves a method of assessing the efficacy of an oncological disorder treatment in a subject, wherein the method involves the steps of providing a test cell population capable of expressing one or more of the nucleic acid sequences of the present invention; detecting the expression of one or more of these nucleic acid sequences; comparing the expression to that of the nucleic acid sequences in a reference cell population whose cancerous stage is known; and identifying a difference in expression level, if present, between the test cell population and the reference cell population. In various embodiments, the subject can be a mammal, or, more preferably, a human. In other embodiments, the test cell population can be provided in vitro, ex vivo from a mammalian subject, or in vivo in a mammalian subject. The expression of the nucleic acid sequences may be either increased or decreased in the test cell population as compared to the reference cell population.

[0018] In a further aspect, the invention involves a method of diagnosing an oncological disorder, wherein the method involves the steps of providing a test cell population capable of expressing one or more of the nucleic acid sequences of the present invention; detecting the expression of one or more of these nucleic acid sequences; comparing the expression to that of the nucleic acid sequences in a reference cell population whose cancerous stage is known; and identifying a difference in expression level, if present, between the test cell population and the reference cell population. In various embodiments, the subject can be a mammal, or, more preferably, a human. In other embodiments, the test cell population can be provided in vitro, ex vivo from a mammalian subject, or in vivo in a mammalian, subject. The expression of the nucleic acid sequences may be either increased or decreased in the test cell population as compared to the reference cell population.

[0019] In another aspect, the invention involves a method of identifying a test therapeutic agent for treating an oncological disorder in a subject involving the steps of providing a test cell population capable of expressing one or more of the nucleic acid sequences of the present invention; contacting the test cell population with the test therapeutic agent; detecting the expression of one or more of these nucleic acid sequences; comparing the expression to that of the nucleic acid sequences in a reference cell population whose cancerous stage is known; and identifying a difference in expression level, if present, between the test cell population and the reference cell population. In different embodiments, the subject may be a mammal or, more preferably, a human. Additionally, the test therapeutic agent may be either a known oncological disorder agent or an unknown oncological disorder agent. The antagonist may be an antibody having selectivity to at least one of the polypeptides of the present invention. The oncological disorder to be treated can be selected from the following diseases or disorders: locally advanced tumors, human soft tissue sarcomas, metastatic cancer, including lymphatic metastases, blood cell malignancies including multiple myeloma, acute and chronic leukemias, and lymphomas, head and neck cancers including mouth cancer, larynx cancer and thyroid cancer, lung cancers including small cell carcinoma and non-small cell cancers, breast cancers including small cell carcinoma and ductal carcinoma, gastrointestinal cancers including esophageal cancer, stomach cancer, colon cancer, colorectal cancer and polyps associated with colorectal neoplasia, pancreatic cancers, liver cancer, urologic cancers including bladder cancer and prostate cancer, malignancies of the female genital tract including ovarian carcinoma, uterine (including endometrial) cancers, and solid tumor in the ovarian follicle, kidney cancers including renal cell carcinoma, brain cancers including intrinsic brain tumors, neuroblastoma, astrocytic brain tumors, gliomas, metastatic tumor cell invasion in the central nervous system, bone cancers including osteomas, skin cancers including malignant melanoma, tumor progression of human skin keratinocytes, squamous cell carcinoma, basal cell carcinoma, hemangiopericytoma and Karposi's sarcoma.

[0020] In a further aspect, the invention involves a method of identifying or determining the susceptibility to, predisposition to, or presence of, an oncological disorder in a subject. In this aspect, the method involves the steps of providing a test cell population capable of expressing one or more of the nucleic acid sequences of the present invention; detecting the expression of one or more of these nucleic acid sequences; comparing the expression to that of the nucleic acid sequences in a reference cell population whose cancerous stage is known; and identifying a difference in expression level, if present, between the test cell population and the reference cell population. The subject may be a mammal, or, more preferably, a human.

[0021] In an alternative aspect, the invention involves a method of treating an oncological disorder by administering an agent that modulates the expression or activity of one or more of the nucleic acid sequences of the present invention to a patient suffering from or at risk for developing the oncological disorder. This agent can be one that decreases the expression of one or more of sequences of the present invention that are up regulated in cancerous tissues. Alternatively, it can be one that increases the expression of one or more of sequences of the present invention that are down regulated. Additionally, the agent can be an antibody to a polypeptide encoded by the nucleic acid sequence, an antisense nucleic acid molecule, a peptide, a polypeptide agonist, a polypeptide antagonist, a peptidomimetic, a small molecule, or another drug.

[0022] The invention also includes a kit containing one or more reagents for detecting two or more of the nucleic acid sequences of the present invention. Additionally, the invention involves an array of probe nucleic acids capable of detected two or more of the nucleic acids of the present invention.

[0023] The polypeptides and nucleic acids of the invention can be used to treat an oncological disorder in a subject. Treatment of an oncological disorder may be in a mammal, preferably a human. In various embodiments, therapeutic compositions containing the polypeptides and nucleic acids of the invention can be used to treat oncological disorders. These therapeutic compositions can include a pharmaceutically acceptable carrier and, additionally, an active ingredient such as an anti-oncological agent or an anti-inflammatory agent. Also provided is a kit containing a therapeutic composition for use in the treatment of an oncological disorder along with a pharmaceutically acceptable carrier, wherein the therapeutic composition is a polypeptide of the present invention, an agonist of a polypeptide of the present invention, or an antagonist of a polypeptide of the present invention.

[0024] Also included in the invention is an isolated nucleic acid molecule that is at least 80% identical to the nucleic acid encoding the polypeptide of the present invention or the complement of the nucleic acid sequence, as well as vectors and host cells containing this nucleic acid sequence. Also provided is a method for producing a polypeptide by culturing a host cell transformed with one or more vectors described herein under conditions suitable for the expression of the protein encoded by the vector.

[0025] In another aspect, there is provided an isolated polypeptide encoded by an isolated nucleic acid sequence or oligonucleotide described herein. In some aspects, the isolated protein, functional variants or fragments thereof. In another embodiment, a variant or fragment of a protein of the present invention retains the respective activity.

[0026] In still further aspects, the invention involves pharmaceutical compositions containing either the isolated nucleic acid, isolated polypeptide or antibody. Another aspect involves methods of detecting the presence of the nucleic acid and polypeptide.

[0027] An additional aspect of the present invention is markers and methods of prognosticating or detecting oncological disorders based on the presence of nucleic acid or polypeptide of the present invention in a biological sample.

[0028] A further embodiment of the present invention is markers and methods for assessing the efficacy of anti cancer treatments based on monitoring the level of a nucleic acid or polypeptide of the present invention in a biological sample.

[0029] Other features and advantages of the invention will be apparent from the following detailed description and from the claims.

### BRIEF DESCRIPTION OF THE DRAWINGS

[0030] FIGS. 1-31. Analysis of putative signal sequence and transmembrane regions of potentially over-expressed tumor proteins. The first seventy N-terminal amino acids of each protein was analyzed the Hidden Markov Model (HMM) SignalP program for the presence of a signal sequence (left graph). In addition, each entire protein was examined by the TMHMM program for possible transmembrane regions (right graph). From this information, the subcellular location and membrane topology of each protein was predicted. FIGS. 1-31 shows the SignalP and TMHMM analysis of the protein sequences of PCTUC-5 (SEQ ID NO:39), PCTUC-93 (SEQ ID NO:46), PCTUC-190 (SEQ ID NO:57), PCTUC-239 (SEQ ID NO:65), PCTUC-246 (SEQ ID NO:40), PCTUC-360 (SEQ ID NO:53), PCTUC-462 (SEQ ID NO:58), PCTUC-468 (SEQ ID NO:48), PCTUC-536 (SEQ ID NO:3114), PCTUC-582 (SEQ ID NO:64), PCTUC-605 (SEQ ID NO:71), PCTUC-629 (SEQ ID NO:67), PCTUC-722 (SEQ ID NO:61), PCTUC-748 (SEQ ID NO:63), PCTUC-784 (SEQ ID NO:72), PCTUC-812 (SEQ ID NO:66), PCTUC-856 (SEQ ID NO:49), PCTUC-898 (SEQ ID NO:43), PCTUC-935 (SEQ ID NO:70), PCTUC-936 (SEQ ID NO:42), PCTUC-986 (SEQ ID NO:47), PCTUC-991 (SEQ ID NO:75), PCTUC-992 (SEQ ID NO:60), PCTUC-1054 (SEQ ID NO:59), PCTUC-1061 (SEQ ID NO:55), PCTUC-1073 (SEQ ID NO:56), PCTUC-1075 (SEQ ID NO:73), PCTUC-1078 (SEQ ID NO:68), PCTUC-1082 (SEQ ID NO:54), PCTUC-1122 (SEQ ID NO:62), and PCTUC-250 (SEQ ID NO:41) respectively.

### DETAILED DESCRIPTION OF THE INVENTION

[0031] The invention relates to genes associated with a cancerous state. It has been discovered that the level of expression of individual genes, also referred to as markers, and combinations of these genes, correlates with the presence of cancer in a patient. Methods are provided for detecting the presence of cancer in a sample; the absence of cancer in a sample, the stage of a cancer, and with other characteristics of cancer that are relevant to prevention, diagnosis, characterization, and therapy of cancer in a patient. The invention also relates to small molecule or antibody therapeutics for the treatment of carcinomas.

[0032] The present invention is based, in part, on identification of novel markers, which are over-expressed in colon cancer cells as compared to their expression in normal (i.e. non-cancerous) colon cells. The markers of the invention correspond to DNA, RNA, and polypeptide molecules, which can be detected in one or both of normal and cancerous colon cells. The enhanced expression of one or more of these markers in colon cells is herein correlated with the cancerous state of the tissue. The invention thus includes compositions, kits, and methods for assessing the cancerous state of colon cells (e.g. cells obtained from a human, cultured human cells, archived or preserved human cells and in vivo cells).

[0033] The present invention relates to:

[0034] An isolated polypeptide comprising an amino acid sequence selected from the group consisting of:
[0035] (a) a mature form of an amino acid sequence selected from the group consisting of SEQ ID NO:39; SEQ ID NO:40; SEQ ID NO:41; SEQ ID NO:42; SEQ ID NO:43; SEQ ID NO:46; SEQ ID NO:47; SEQ ID NO:48; SEQ ID NO:49; SEQ ID NO:53; SEQ ID NO:54; SEQ ID NO:55; SEQ ID NO:56; SEQ ID NO:57; SEQ ID NO:58; SEQ ID NO:59; SEQ ID NO:60; SEQ ID NO:61; SEQ ID NO:62; SEQ ID NO:63; SEQ ID NO:64; SEQ ID NO:65; SEQ ID NO:66; SEQ ID NO:67; SEQ ID NO:68; SEQ ID NO:70; SEQ ID NO:71; SEQ ID NO:72; SEQ ID NO:73; SEQ ID NO:74; SEQ ID NO:75; and SEQ ID NO:3114;
[0036] (b) a variant of a mature form of an amino acid sequence selected from the group consisting of SEQ ID NO:39; SEQ ID NO:40; SEQ ID NO:41; SEQ ID NO:42; SEQ ID NO:43; SEQ ID NO:46; SEQ ID NO:47; SEQ ID NO:48; SEQ ID NO:49; SEQ ID NO:53; SEQ ID NO:54; SEQ ID NO:55; SEQ ID NO:56; SEQ ID NO:57; SEQ ID NO:58; SEQ ID NO:59; SEQ ID NO:60; SEQ ID NO:61; SEQ ID NO:62; SEQ ID NO:63; SEQ ID NO:64; SEQ ID NO:65; SEQ ID NO:66; SEQ ID NO:67; SEQ ID NO:68; SEQ ID NO:70; SEQ ID NO:71; SEQ ID NO:72; SEQ ID NO:73; SEQ ID NO:74; SEQ ID NO:75; and SEQ ID NO:3114, wherein one or more amino acid residues in said variant differs from the amino acid sequence of said mature form, provided that said variant differs in no more than 20%, of the amino acid residues from the amino acid sequence of said mature form;
[0037] (c) an amino acid sequence comprising a sequence selected from the group consisting of SEQ ID NO:39; SEQ ID NO:40; SEQ ID NO:41; SEQ ID NO:42; SEQ ID NO:43; SEQ ID NO:46; SEQ ID NO:47; SEQ ID NO:48; SEQ ID NO:49; SEQ ID NO:53; SEQ ID NO:54; SEQ ID NO:55; SEQ ID NO:56; SEQ ID NO:57; SEQ ID NO:58; SEQ ID NO:59; SEQ ID NO:60; SEQ ID NO:61; SEQ ID NO:62; SEQ ID NO:63; SEQ ID NO:64; SEQ ID NO:65; SEQ ID NO:66; SEQ ID NO:67; SEQ ID NO:68; SEQ ID NO:70; SEQ ID NO:71; SEQ ID NO:72; SEQ ID NO:73; SEQ ID NO:74; SEQ ID NO:75; and SEQ ID NO:3114; and
[0038] (d) a variant of an amino acid sequence comprising a sequence selected from the group consisting of SEQ ID NO:39; SEQ ID NO:40; SEQ ID NO:41; SEQ ID NO:42; SEQ ID NO:43; SEQ ID NO:46; SEQ ID NO:47; SEQ ID NO:48; SEQ ID NO:49; SEQ ID NO:53; SEQ ID NO:54; SEQ ID NO:55; SEQ ID NO:56; SEQ ID NO:57; SEQ ID NO:58; SEQ ID NO:59; SEQ ID NO:60; SEQ ID NO:61; SEQ ID NO:62; SEQ ID NO:63; SEQ ID NO:64; SEQ ID NO:65; SEQ ID NO:66; SEQ ID NO:67; SEQ ID NO:68; SEQ ID NO:70; SEQ ID NO:71; SEQ ID NO:72; SEQ ID NO:73; SEQ ID NO:74; SEQ ID NO:75; and SEQ ID NO:3114, wherein one or more amino acid residues in said variant differs from the amino acid sequence, provided that said variant differs in no more than 20% of amino acid residues from said amino acid sequence.

[0039] An isolated polypeptide wherein the amino acid sequence is selected from the group consisting of: SEQ ID NO:39; SEQ ID NO:40; SEQ ID NO:41; SEQ ID NO:42; SEQ ID NO:43; SEQ ID NO:46; SEQ ID NO:47; SEQ ID NO:48; SEQ ID NO:49; SEQ ID NO:53; SEQ ID NO:54; SEQ ID NO:55; SEQ ID NO:56; SEQ ID NO:57; SEQ ID NO:58; SEQ ID NO:59; SEQ ID NO:60; SEQ ID NO:61; SEQ ID NO:62; SEQ ID NO:63; SEQ ID NO:64; SEQ ID NO:65; SEQ ID NO:66; SEQ ID NO:67; SEQ ID NO:68; SEQ ID NO:70; SEQ ID NO:71; SEQ ID NO:72; SEQ ID NO:73; SEQ ID NO:74; SEQ ID NO:75; and SEQ ID NO:3114.

[0040] An isolated polypeptide wherein the amino acid sequence is selected from the group consisting of: SEQ ID NO:39; SEQ ID NO:56; SEQ ID NO:59; SEQ ID NO:61; SEQ ID NO:62; SEQ ID NO:65; and SEQ ID NO:68.

[0041] An isolated polypeptide wherein the amino acid sequence is selected from the group consisting of: SEQ ID NO:43; SEQ ID NO:46; SEQ ID NO:47; SEQ ID NO:54; SEQ ID NO:55; SEQ ID NO:57; SEQ ID NO:58; SEQ ID NO:60; SEQ ID NO:63; SEQ ID NO:64; SEQ ID NO:66; SEQ ID NO:67; SEQ ID NO:70; SEQ ID NO:73, and SEQ ID NO:3114.

[0042] An isolated polypeptide wherein the amino acid sequence is selected from the group consisting of: SEQ ID NO:40; SEQ ID NO:41; SEQ ID NO:42; SEQ ID NO:48; SEQ ID NO:49; SEQ ID NO:53; SEQ ID NO:71; SEQ ID NO:72; and SEQ ID NO:75.

[0043] An isolated polypeptide wherein the amino acid sequence is selected from the group consisting of: SEQ ID NO: 39; SEQ ID NO:40; SEQ ID NO:41; SEQ ID NO:42; and SEQ ID NO:43.

[0044] An isolated polypeptide wherein said amino acid sequence is encoded by a nucleic acid sequence selected from the group consisting of SEQ ID NO:1; SEQ ID NO:2; SEQ ID NO:3; SEQ ID NO:4; SEQ ID NO:5; SEQ ID NO:8; SEQ ID NO:9; SEQ ID NO:10; SEQ ID NO:11; SEQ ID NO:15; SEQ ID NO:16; SEQ ID NO:17; SEQ ID NO:18; SEQ ID NO:19; SEQ ID NO:20; SEQ ID NO:21; SEQ ID NO:22; SEQ ID NO:23; SEQ ID NO:24; SEQ ID NO:25; SEQ ID NO:26; SEQ ID NO:27; SEQ ID NO:28; SEQ ID NO:29; SEQ ID NO:30; SEQ ID NO:32; SEQ ID NO:33; SEQ ID NO:34; SEQ ID NO:35; SEQ ID NO:37; and SEQ ID NO:3113.

[0045] An polypeptide wherein said polypeptide comprises an amino acid sequence of a naturally-occurring allelic variant of an amino acid sequence selected from the group consisting of SEQ ID NO:39; SEQ ID NO:40; SEQ ID NO:41; SEQ ID NO:42; SEQ ID NO:43; SEQ ID NO:46; SEQ ID NO:47; SEQ ID NO:48; SEQ ID NO:49; SEQ ID NO:53; SEQ ID NO:54; SEQ ID NO:55; SEQ ID NO:56; SEQ ID NO:57; SEQ ID NO:58; SEQ ID NO:59; SEQ ID NO:60; SEQ ID NO:61; SEQ ID NO:62; SEQ ID NO:63; SEQ ID NO:64; SEQ ID NO:65; SEQ ID NO:66; SEQ ID NO:67; SEQ ID NO:68; SEQ ID NO:70; SEQ ID NO:71; SEQ ID NO:72; SEQ ID NO:73; SEQ ID NO:74; SEQ ID NO:75; and SEQ ID NO:3114.

[0046] An polypeptide wherein said allelic variant comprises an amino acid sequence that is the translation of a nucleic acid sequence differing by a single nucleotide from a nucleic acid sequence selected from the group consisting of SEQ ID NO:1; SEQ ID NO:2; SEQ ID NO:3; SEQ ID NO:4; SEQ ID NO:5; SEQ ID NO:8; SEQ ID NO:9; SEQ ID NO:10; SEQ ID NO:11; SEQ ID NO:15; SEQ ID NO:16; SEQ ID NO:17; SEQ ID NO:18; SEQ ID NO:19; SEQ ID NO:20; SEQ ID NO:21; SEQ ID NO:22; SEQ ID NO:23; SEQ ID NO:24; SEQ ID NO:25; SEQ ID NO:26; SEQ ID NO:27; SEQ ID NO:28; SEQ ID NO:29; SEQ ID NO:30; SEQ ID NO:32; SEQ ID NO:33; SEQ ID NO:34; SEQ ID NO:35; SEQ ID NO:37; and SEQ ID NO:3113.

[0047] A polypeptide variant wherein the amino acid substitution is a conservative amino acid.

[0048] A nucleic acid molecule selected from the group consisting of SEQ ID NO:1; SEQ ID NO:2; SEQ ID NO:3; SEQ ID NO:4; SEQ ID NO:5; SEQ ID NO:8; SEQ ID NO:9; SEQ ID NO:10; SEQ ID NO:1; SEQ ID NO:15; SEQ ID NO:16; SEQ ID NO:17; SEQ ID NO:18; SEQ ID NO:19; SEQ ID NO:20; SEQ ID NO:21; SEQ ID NO:22; SEQ ID NO:23; SEQ ID NO:24; SEQ ID NO:25; SEQ ID NO:26; SEQ ID NO:27; SEQ ID NO:28; SEQ ID NO:29; SEQ ID NO:30; SEQ ID NO:32; SEQ ID NO:33; SEQ ID NO:34; SEQ ID NO:35; SEQ ID NO:37; and SEQ ID NO:3113.

[0049] A nucleic acid molecule selected from the group consisting of SEQ ID NO:1; SEQ ID NO:18; SEQ ID NO:21; SEQ ID NO:23; SEQ ID NO:24; SEQ ID NO:27; and SEQ ID NO:30.

[0050] A nucleic acid molecule selected from the group consisting of SEQ ID NO:5; SEQ ID NO:8; SEQ ID NO:9; SEQ ID NO:16; SEQ ID NO:17; SEQ ID NO:19; SEQ ID NO:20; SEQ ID NO:22; SEQ ID NO:25; SEQ ID NO:26; SEQ ID NO:28; SEQ ID NO:29; SEQ ID NO:32; SEQ ID NO:35; and SEQ ID NO:3113.

[0051] A nucleic acid molecule selected from the group consisting of SEQ ID NO:2; SEQ ID NO:3; SEQ ID NO:4; SEQ ID NO:10; SEQ ID NO:11; SEQ ID NO:15; SEQ ID NO:33; SEQ ID NO:34; SEQ ID NO:37.

[0052] A nucleic acid molecule selected from the group consisting of SEQ ID NO:1; SEQ ID NO:2; SEQ ID NO:3; SEQ ID NO:4; and SEQ ID NO:5.

[0053] A nucleic acid molecule that differs by a single nucleotide from a nucleic acid sequence selected from the group consisting of: SEQ ID NO:1; SEQ ID NO:2; SEQ ID NO:3; SEQ ID NO:4; SEQ ID NO:5; SEQ ID NO:8; SEQ ID NO:9; SEQ ID NO:10; SEQ ID NO:11; SEQ ID NO:15; SEQ ID NO:16; SEQ ID NO:17; SEQ ID NO:18; SEQ ID NO:19; SEQ ID NO:20; SEQ ID NO:21; SEQ ID NO:22; SEQ ID NO:23; SEQ ID NO:24; SEQ ID NO:25; SEQ ID NO:26; SEQ ID NO:27; SEQ ID NO:28; SEQ ID NO:29; SEQ ID NO:30; SEQ ID NO:32; SEQ ID NO:33; SEQ ID NO:34; SEQ ID NO:35; SEQ ID NO:37; and SEQ ID NO:3113.

[0054] A nucleic acid molecule that hybridizes under stringent conditions to a nucleotide sequence selected from the group consisting of: SEQ ID NO:1; SEQ ID NO:2; SEQ ID NO:3; SEQ ID NO:4; SEQ ID NO:5; SEQ ID NO:8; SEQ ID NO:9; SEQ ID NO:10; SEQ ID NO:11; SEQ ID NO:15; SEQ ID. NO:16; SEQ ID NO:17; SEQ ID NO:18; SEQ ID NO:19; SEQ ID NO:20; SEQ ID NO:21; SEQ ID NO:22; SEQ ID NO:23; SEQ ID NO:24; SEQ ID NO:25; SEQ ID NO:26; SEQ ID NO:27; SEQ ID NO:28; SEQ ID NO:29; SEQ ID NO:30; SEQ ID NO:32; SEQ ID NO:33; SEQ ID NO:34; SEQ ID NO:35; SEQ ID NO:37; and SEQ ID NO:3113, or a complement of said nucleotide sequence.

[0055] A vector comprising a nucleic acid molecule of the present invention.

[0056] A vector comprising a nucleic acid molecule of the present invention oberably linked to a promoter.

[0057] A cell transformed or transfected with a vector of vector of the present invention.

[0058] A cell transformed or transfected with a nucleic acid sequence selected from the group SEQ ID NO:1; SEQ ID NO:2; SEQ ID NO:3; SEQ ID NO:4; SEQ ID NO:5; SEQ ID NO:8; SEQ ID NO:9; SEQ ID NO:10; SEQ ID NO:11; SEQ ID NO:15; SEQ ID NO:16; SEQ ID NO:17; SEQ ID NO:18; SEQ ID NO:19; SEQ ID NO:20; SEQ ID NO:21; SEQ ID NO:22; SEQ ID NO:23; SEQ ID NO:24; SEQ ID NO:25; SEQ ID NO:26; SEQ ID NO:27; SEQ ID NO:28; SEQ ID NO:29; SEQ ID NO:30; SEQ ID NO:32; SEQ ID NO:33; SEQ ID NO:34; SEQ ID NO:35; SEQ ID NO:37; and SEQ ID NO:3113

[0059] A microarray comprising nucleic acid sequences selected from the group consisting of SEQ ID NO.77 through SEQ ID NO:3011.

[0060] A microarray comprising nucleic acid sequences selected from the group consisting of SEQ ID NO:77 through SEQ ID NO:1993.

[0061] A microarray comprising nucleic acid sequences selected from the group consisting of SEQ ID NO:1994 through SEQ ID NO:3011.

[0062] A microarray comprising a nucleic acid sequence selected from the group consisting of SEQ ID NO:1; SEQ ID NO:2; SEQ ID NO:3; SEQ ID NO:4; SEQ ID NO:5; SEQ ID NO:8; SEQ ID NO:9; SEQ ID NO:10; SEQ ID NO:11; SEQ ID NO:15; SEQ ID NO:16; SEQ ID NO:17; SEQ ID NO:18; SEQ ID NO:19; SEQ ID NO:20; SEQ ID NO:21; SEQ ID NO:22; SEQ ID NO:23; SEQ ID NO:24; SEQ ID NO:25; SEQ ID NO:26; SEQ ID NO:27; SEQ ID NO:28; SEQ ID NO:29; SEQ ID NO:30; SEQ ID NO:32; SEQ ID NO:33; SEQ ID NO:34; SEQ ID NO:35; SEQ ID NO:37; and SEQ ID NO:3113.

[0063] A microarray comprising a nucleic acid sequence selected from the group consisting of SEQ ID NO:1; SEQ ID NO:18; SEQ ID NO:21; SEQ ID NO:23; SEQ ID NO:24; SEQ ID NO:27; and SEQ ID NO:30.

[0064] A microarray comprising a nucleic acid sequence selected from the group consisting of SEQ ID NO:1; SEQ ID NO:18; SEQ ID NO:21; SEQ ID NO:23; SEQ ID NO:24; SEQ ID NO:27; and SEQ ID NO:30.

[0065] A microarray comprising a nucleic acid sequence selected from the group consisting of SEQ ID NO:5; SEQ ID NO:8; SEQ ID NO:9; SEQ ID NO:16; SEQ ID NO:17; SEQ ID NO:19; SEQ ID NO:20; SEQ ID NO:22; SEQ ID NO:25; SEQ ID NO:26; SEQ ID NO:28; SEQ ID NO:29; SEQ ID NO:32; SEQ ID NO:35; and SEQ ID NO:3113.

[0066] A microarray comprising a nucleic acid sequence selected from the group consisting of SEQ ID NO:2; SEQ ID NO:3; SEQ ID NO:4; SEQ ID NO:10; SEQ ID NO:11; SEQ ID NO:15; SEQ ID NO:33; SEQ ID NO:34; and SEQ ID NO:37.

[0067] A microarray comprising a nucleic acid sequence selected from the group consisting of SEQ ID NO:1; SEQ ID NO:2; SEQ ID NO:3; SEQ ID NO:4; and SEQ ID NO:5.

[0068] An antibody that immunospecifically-binds to the polypeptide of SEQ ID NO:39; SEQ ID NO:40; SEQ ID NO:41; SEQ ID NO:42; SEQ ID NO:43; SEQ ID NO:46; SEQ ID NO:47; SEQ ID NO:48; SEQ ID NO:49; SEQ ID NO:53; SEQ ID NO:54; SEQ ID NO:55; SEQ ID NO:56; SEQ ID NO:57; SEQ ID NO:58; SEQ ID NO:59; SEQ ID NO:60; SEQ ID NO:61; SEQ ID NO:62; SEQ ID NO:63; SEQ ID NO:64; SEQ ID NO:65; SEQ ID NO:66; SEQ ID NO:67; SEQ ID NO:68; SEQ ID NO:70; SEQ ID NO:71; SEQ ID NO:72; SEQ ID NO:73; SEQ ID NO:74; SEQ ID NO:75; and SEQ ID NO:3114.

[0069] The antibody may be monoclonal antibody, an antibody fragment selected from but not limited to a FV fragment, a Fab fragment, (Fab)₂ fragment, a single chain antibody.

[0070] The antibody may be a conjugated with at least one polyethylene glycol moiety.

[0071] The antibody may be an antagonist.

[0072] The antibody may be a humanized antibody or a human antibody.

[0073] A method for determining the presence or amount of the polypeptide of the present invention in a sample, the method comprising
[0074] (a) providing the sample;
[0075] (b) contacting the sample with an antibody that binds immunospecifically to the polypeptide; and
[0076] (c) determining the presence or amount of antibody bound to said polypeptide;
[0077] thereby determining the presence or amount of polypeptide in said sample.

[0078] A method for determining the presence or amount of the nucleic acid molecule of the present invention in a sample, the method comprising:
[0079] (a) providing the sample;
[0080] (b) contacting the sample with a probe that binds to said nucleic acid molecule; and
[0081] (c) determining the presence or amount of the probe bound to said nucleic acid molecule;
[0082] thereby determining the presence or amount of the nucleic acid molecule in said sample.

[0083] A method of identifying an agent that binds to a polypeptide of claim 1, the method comprising:
[0084] (a) contacting said polypeptide with said agent; and
[0085] (b) determining whether said agent binds to said polypeptide.

[0086] A method for identifying an agent that modulates the expression or activity of the polypeptide of claim 1, the method comprising:
[0087] (a) providing a cell expressing said polypeptide in an operational manner;
[0088] (b) contacting the cell with said agent; and
[0089] (c) determining whether the agent modulates expression or activity of said polypeptide;
[0090] whereby an alteration in expression or activity of said peptide indicates said agent modulates expression or activity of said polypeptide.

[0091] A method for modulating the activity of the polypeptide of the present invention, the method comprising contacting a cell sample expressing the polypeptide with a compound that binds to the polypeptide in an amount sufficient to modulate the activity of the polypeptide.

[0092] A method of treating or preventing a cancer-associated disorder, said method comprising administering to a subject in which such treatment or prevention is desired the polypeptide of present invention in an amount sufficient to treat or prevent said cancer-associated disorder in said subject.

[0093] A method of treating or preventing a cancer-associated disorder, said method comprising administering to a subject in which such treatment or prevention is desired an antibody of the present invention in an amount sufficient to treat or prevent said cancer-associated disorder in said subject.

[0094] A pharmaceutical composition comprising a polypeptide of the present invention and at least one pharmaceutically acceptable carrier.

[0095] A kit comprising the pharmaceutical composition of the present invention.

[0096] A method of detecting differentially expressed genes correlated with a cancerous state of a mammalian cell, the method comprising the step of detecting at least one differentially expressed gene product in a test sample derived from a cell suspected of being cancerous, where the gene product is encoded by a sequence of SEQ ID NO:1; SEQ ID NO:2; SEQ ID NO:3; SEQ ID NO:4; SEQ ID NO:5; SEQ ID NO:8; SEQ ID NO:9; SEQ ID NO:10; SEQ ID NO:1; SEQ ID NO:15; SEQ ID NO:16; SEQ ID NO:17; SEQ ID NO:18; SEQ ID NO:19; SEQ ID NO:20; SEQ ID NO:21; SEQ ID NO:22; SEQ ID NO:23; SEQ ID NO:24; SEQ ID NO:25; SEQ ID NO:26; SEQ ID NO:27; SEQ ID NO:28; SEQ ID NO:29; SEQ ID NO:30; SEQ ID NO:32; SEQ ID NO:33; SEQ ID NO:34; SEQ ID NO:35; SEQ ID NO:37; and SEQ ID NO:3113 wherein detection of differentially expressed product is correlated with a cancerous state of the cell from which the test sample was derived.

[0097] A method for detecting the presence of a nucleic acid molecule of the present invention in a sample comprising:
[0098] (a) contacting the sample with a nucleic acid probe or primer which selectively hybridizes to the nucleic acid molecule; and
[0099] (b) determining whether the nucleic acid probe or primer binds to a nucleic acid molecule in the sample to thereby detect the presence of a nucleic acid molecule in the sample.

[0100] A method for detecting the presence of a nucleic acid molecule of the present invention in a sample comprising:
[0101] (a) contacting the sample with a nucleic acid probe or primer which selectively hybridizes to the nucleic acid molecule; and
[0102] (b) determining whether the nucleic acid probe or primer binds to a nucleic acid molecule in the sample to thereby detect the presence of a nucleic acid molecule in the sample.

[0103] A method for detecting the presence of a nucleic acid molecule selected from the group consisting of SEQ ID NO:77 through SEQ ID NO:3011 in a sample comprising:
[0104] (a) contacting the sample with a nucleic acid probe, or primer which selectively hybridizes to the nucleic acid molecule; and
[0105] (b) determining whether the nucleic acid probe or primer binds to a nucleic acid molecule in the sample to thereby detect the presence of a nucleic acid molecule selected from the group consisting of SEQ ID NO:77 through SEQ ID NO:3011 in the sample.

[0106] A method for detecting the presence of a nucleic acid molecule selected from the group consisting of SEQ ID NO:77 through SEQ ID NO:1993 in a sample comprising:
[0107] (a) contacting the sample with a nucleic acid probe or primer which selectively hybridizes to the nucleic acid molecule; and
[0108] (b) determining whether the nucleic acid probe or primer binds to a nucleic acid molecule in the sample to thereby detect the presence of a nucleic acid molecule selected from the group consisting of SEQ ID NO:77 through SEQ ID NO:1993 in the sample.

[0109] A method for detecting the presence of a nucleic acid molecule selected from the group consisting of SEQ ID NO:1994 through SEQ ID NO:3011 in a sample comprising:
[0110] (a) contacting the sample with a nucleic acid probe or primer which selectively hybridizes to the nucleic acid molecule; and
[0111] (b) determining whether the nucleic acid probe or primer binds to a nucleic acid molecule in the sample to thereby detect the presence of a nucleic acid molecule selected from the group consisting of SEQ ID NO:1994 through SEQ ID NO:3011 in the sample.

[0112] A method for monitoring the progression of a cancer in a patient, the method comprising:
[0113] (a) detecting in a patient sample at a first point in time, the expression of a marker, wherein the marker a nucleic acid molecule of the present invention;
[0114] (b) repeating step a) at a subsequent point in time; and
[0115] (c) comparing the level of expression detected in steps a) and b), and therefrom monitoring the progression of the cancer.

[0116] A method for monitoring the progression of a cancer in a patient, the method comprising:
[0117] (a) detecting in a patient sample at a first point in time, the expression of a marker, wherein the marker a nucleic acid molecule of of the present invention;
[0118] (b) repeating step a) at a subsequent point in time; and
[0119] (c) comparing the level of expression detected in steps a) and b), and therefrom monitoring the progression of the cancer.

[0120] A method for monitoring the progression of a cancer in a patient, the method comprising:
[0121] (a) detecting in a patient sample at a first point in time, the expression of a marker, wherein the marker is a nucleic acid molecule selected from the group consisting of SEQ ID NO:77 through SEQ ID NO:3011;
[0122] (b) repeating step a) at a subsequent point in time; and
[0123] (c) comparing the level of expression detected in steps a) and b), and therefrom monitoring the progression of the cancer.

[0124] A method for monitoring the progression of a cancer in a patient, the method comprising:
[0125] (a) detecting in a patient sample at a first point in time, the expression of a marker, wherein the marker is a nucleic acid molecule selected from the group consisting of SEQ ID NO:77 through SEQ ID NO:1993;
[0126] (b) repeating step a) at a subsequent point in time; and
[0127] (c) comparing the level of expression detected in steps a) and b), and therefrom monitoring the progression of the cancer.

[0128] A method for monitoring the progression of a cancer in a patient, the method comprising:
[0129] (a) detecting in a patient sample at a first point in time, the expression of a marker, wherein the marker is a nucleic acid molecule selected from the group consisting of SEQ ID NO:1994 through SEQ ID NO:3011;
[0130] (b) repeating step a) at a subsequent point in time; and
[0131] (c) comparing the level of expression detected in steps a) and b), and therefrom monitoring the progression of the cancer.

[0132] A method of assessing the efficacy of a test compound for inhibiting a cancer in a patient, the method comprising comparing:
[0133] (a) expression of a marker in a first sample obtained from the patient exposed to the test compound, wherein the marker is selected the nucleic acid molecule of the present invention, and
[0134] (b) expression of the marker in a second sample obtained from the patient, wherein the sample is not exposed to the test compound, wherein a significantly lower level of expression of the marker in the first sample, relative to the second sample, is an indication that the test compound is efficacious for inhibiting the cancer in the patient.

[0135] A method of assessing the efficacy of a test compound for inhibiting a cancer in a patient, the method comprising comparing:
[0136] (a) expression of a marker in a first sample obtained from the patient exposed to the test compound, wherein the marker is selected the a nucleic acid molecule selected from the group consisting of SEQ ID NO:77 through SEQ ID NO:1993, and
[0137] (b) expression of the marker in a second sample obtained from the patient, wherein the sample is not exposed to the test compound, wherein a significantly lower level of expression of the marker in the first sample, relative to the second sample, is an indication that the test compound is efficacious for inhibiting the cancer in the patient.

[0138] A method of assessing the efficacy of a therapy for inhibiting a cancer in a patient, the method comprising comparing:
[0139] (a) expression of a marker in the first sample obtained from the patient prior to providing at least a portion of the therapy to the patient, wherein the marker is a nucleic acid sequence selected from the group consisting of SEQ ID NO:1994 through SEQ ID NO:3011, and
[0140] (b) expression of the marker in a second sample obtained from the patient following provision of the portion of the therapy, wherein a significantly lower level of expression of the marker in the second sample, relative to the first sample, is an indication that the therapy is efficacious for inhibiting the cancer in the patient.

[0141] A method of selecting a composition for inhibiting a cancer in a patient, the method comprising:
[0142] (a) obtaining a sample comprising cancer cells from the patient;
[0143] (b) separately exposing aliquots of the sample in the presence of a plurality of test compositions;
[0144] (c) comparing expression of a marker in each of the aliquots, wherein the marker is the nucleic acid of of the present invention; and
[0145] (d) selecting one of the test compositions which alters the level of expression of the marker in the aliquot containing that test composition, relative to other test compositions.

[0146] A method of selecting a composition for inhibiting a cancer in a patient, the method comprising:
[0147] (a) obtaining a sample comprising cancer cells from the patient;
[0148] (b) separately exposing aliquots of the sample in the presence of a plurality of test compositions;
[0149] (c) comparing expression of a marker in each of the aliquots, wherein the marker is the nucleic acid of the present invention; and
[0150] (d) selecting one of the test compositions which alters the level of expression of the marker in the aliquot containing that test composition, relative to other test compositions.

[0151] A method of selecting a composition for inhibiting a cancer in a patient, the method comprising:
[0152] (a) obtaining a sample comprising cancer cells from the patient;
[0153] (b) separately exposing aliquots of the sample in the presence of a plurality of test compositions;
[0154] (c) comparing expression of a marker in each of the aliquots, wherein the marker is a nucleic acid sequence selected from the group consisting of SEQ ID NOs:77-1993; and
[0155] (d) selecting one of the test compositions which alters the level of expression of the marker in the aliquot containing that test composition, relative to other test compositions.

[0156] A method of selecting a composition for inhibiting a cancer in a patient, the method comprising:
[0157] (a) obtaining a sample comprising cancer cells from the patient;
[0158] (b) separately exposing aliquots of the sample in the presence of a plurality of test compositions;
[0159] (c) comparing expression of a marker in each of the aliquots, wherein the marker is a nucleic acid sequence selected from the group consisting of SEQ ID NOs:1994-3011; and
[0160] (d) selecting one of the test compositions which alters the level of expression of the marker in the aliquot containing that test composition, relative to other test compositions.

[0161] An antisense compound 8 to 30 nucleobases in length targeted to a nucleic acid molecule of the present invention encoding the polypeptide of the present invention, wherein said antisense compound specifically hybridizes with and inhibits the expression of the polypeptide.

[0162] Transcriptional profiling analysis was performed on primary colon tumors. The mRNA was isolated from the colon tumors and mRNA was isolated from normal colons. Transcripts that were differentially expressed greater than 2 fold and in 30% or more of the tumors were further analyzed by Signal P analysis and Trans Membrane Hidden Markov Models (TMHMM) to determine if they were membrane associated or secreted. The transcripts determined to be associated with the membrane were then further validated by Sybrgreen (real time PCR) analysis on an additional set of colon and breast tumors compared to corresponding normal tissue.

[0163] These sequences that were differentially expressed can be used to develop new small molecule and antibody therapeutics for the treatment of carcinoma, including colon, lung, breast, and prostate tumors. All of these sequences also provide potential biomarkers and efficacy markers for carcinoma. The sequences can be used to generate antibody reagents, full length clones, and can be evaluated in in vitro and in vivo assays to determine function.

[0164] The present invention discloses the nucleic acid sequences SEQ ID NOs:1994-3011, which are down-regulated in human colon tumor cells.

[0165] The present invention discloses the nucleic acid sequences SEQ ID NOs:1-11, SEQ ID NOs:13-38, SEQ ID NOs:77-1993, and SEQ ID NO:3113, which are up-regulated in human colon tumor cells.

[0166] The present invention discloses 31 transcripts, and the proteins encoded by them that are up-regulated in human colon tumor cells. A summary of these differentially expressed genes is included in Table 1.

TABLE 1

| Transcript | | GenBank | Gene | Protein |
|---|---|---|---|---|
| Designation | Gene Name | acc number | sequence | sequence |
| PCTUC_5 | (p-cadherin) | NM 001793 | SEQ ID NO: 1 | SEQ ID NO: 39 |
| PCTUC_93 | (opiate binding- | NM 002545 | SEQ ID NO: 8 | SEQ ID NO: 46 |
| | cell adhesion molecule) | | | |
| PCTUC_190 | (organic anion transporter | NM016354 | SEQ ID NO: 19 | SEQ ID NO: 57 |
| | polypeptide-related | | | |
| | protein 1, OATPRP1) | | | |
| PCTUC_239 | (carcinoembryonic | NM 004363 | SEQ ID NO: 27 | SEQ ID NO: 65 |
| | antigen-related cel | | | |
| | adhesion molecule 5) | | | |
| | (CEACAM5) | | | |
| PCTUC_246 | (RON kinase) | NM 002447 | SEQ ID NO: 2 | SEQ ID NO: 40 |
| PCTUC_250 | G-protein couple | NM 005682 | SEQ ID NO: 3 | SEQ ID NO: 41 |
| | receptor (GPR56) | | | |
| PCTUC_360 | (STEAP1) | NM 012449 | SEQ ID NO: 15 | SEQ ID NO: 53 |
| PCTUC_462 | (bumetanide-sensitive | NM 001046 | SEQ ID NO: 20 | SEQ ID NO: 58 |
| | Na—K—Cl | | | |
| | cotransporter, NKCC1) | | | |
| PCTUC_468 | (neuroligin_1, NLGN1) | NM 014932 | SEQ ID NO: 10 | SEQ ID NO: 48 |
| PCTUC_536 | (COLNOV1) | NM 033408 | SEQ ID NO: 3113 | SEQ ID NO: 3114 |
| PCTUC_582 | (CEACAM8) | NM 001816 | SEQ ID NO: 26 | SEQ ID NO: 64 |
| PCTUC_605 | (epican, CD44) | NM 000610 | SEQ ID NO: 33 | SEQ ID NO: 71 |
| PCTUC_629 | (monocarboxylate | NM 004207 | SEQ ID NO: 29 | SEQ ID NO: 67 |
| | transporter) (MCT3) | | | |
| PCTUC_722 | (integrin beta(4)subunit) | NM 000213 | SEQ ID NO: 23 | SEQ ID NO: 61 |
| PCTUC_748 | (T245 protein, T245) | NM 003270 | SEQ ID NO: 25 | SEQ ID NO: 63 |
| PCTUC_784 | (membrane cofactor | NM 002389 | SEQ ID NO: 34 | SEQ ID NO: 72 |
| | protein, CD46, MCP) | | | |
| PCTUC_812 | (protocadherin-9) (PCDH9) | NM 020403 | SEQ ID NO: 28 | SEQ ID NO: 66 |
| PCTUC_856 | (extraneuronal | NM 021977 | SEQ ID NO: 11 | SEQ ID NO: 49 |
| | monoamine transporter) | | | |
| PCTUC_898 | (KIAA0792) | NM 014698 | SEQ ID NO: 5 | SEQ ID NO: 43 |
| PCTUC_935 | (voltage gated potassium | NM 000218 | SEQ ID NO: 32 | SEQ ID NO: 70 |
| | channel, KCNQ1) | | | |
| PCTUC_936 | (FGFR3) | NM 000142 | SEQ ID NO: 4 | SEQ ID NO: 42 |
| PCTUC_986 | (senescence-associated | NM 021101 | SEQ ID NO: 9 | SEQ ID NO: 47 |
| | epithelial membrane | | | |
| | protein, SEMP1) | | | |
| PCTUC_991 | (osteoblast specific | NM 006475 | SEQ ID NO: 37 | SEQ ID NO: 75 |
| | factor 2, OSF-2os) | | | |
| PCTUC_992 | (NRAMP2) | NM 000617 | SEQ ID NO: 22 | SEQ ID NO: 60 |
| PCTUC_1054 | (polymorphic epithelial | NM 002456 | SEQ ID NO: 21 | SEQ ID NO: 59 |
| | mucin) (PEM) | | | |
| PCTUC_1061 | (KIAA0779) | AB018322 | SEQ ID NO: 17 | SEQ ID NO: 55 |
| PCTUC_1073 | (decay accelerating | NM 000574 | SEQ ID NO: 18 | SEQ ID NO: 56 |
| | factor for complement, | | | |
| | CD55, DAF) | | | |
| PCTUC_1075 | (solute carrier family 6 | NM 003043 | SEQ ID NO: 35 | SEQ ID NO: 73 |
| | member 6, neurotransmitter | | | |
| | transporter, taurine) | | | |
| PCTUC_1078 | (osteopontin) | NM 000582 | SEQ ID NO: 30 | SEQ ID NO: 68 |
| PCTUC_1082 | (claudin 2) | NM 020384 | SEQ ID NO: 16 | SEQ ID NO: 54 |
| PCTUC_1122 | (hepatoma transmembrane | NM 004093 | SEQ ID NO: 24 | SEQ ID NO: 62 |
| | kinase ligand, HTK ligand) | | | |

[0167] The following gene descriptions are shown as representative of the types of genes discovered in the present invention by the process described above. Since some of the genes are currently know to be associated with colon cancer, the identification of these genes by this method serves to validate the approach, such as: SEQ ID NO:1; SEQ ID NO:18; SEQ ID NO:21; SEQ ID NO:23; SEQ ID NO:24; SEQ ID NO:27; SEQ ID NO:30.

[0168] Description of Representtive Overexpressed Genes Found in Human Colon Tumors.

[0169] Opiate (Opioid) Binding-Cell Adhesion Molecule (OBCAM)

[0170] OBCAM as first identified by Cho et al., Proc Natl Acad Sci 80: 5176-80, (1983), was characterized as similar to other cell-adhesion molecules and named OBCAM by Schofield et al., EMBO J. February 8(2): 489-95, (1989). The gene was cloned and sequenced from the human brain by Shark and Lee, Gene 155: 213-17, (1995). It was shown to be a neuron specific protein, presumed to play a role as a cell adhesion/recognition molecule, but its function has not been fully elucidated. Indirect evidence indicates a role for this protein in opioid function. Studies have suggested that the function of OBCAM in the brain may involve axonal outgrowth.

[0171] SEMP1 (Claudin 1: CLDN1; Senescence-Associated Epithelial Membrane Protein 1)

[0172] Swisshelm et al., Gene 226: 285-95, (1999) isolated cDNAs encoding SEMP1 from human mammary epithelial cells. The mRNA was shown to be expressed in human tissues, including adult and fetal liver, pancreas, placenta, adrenals, prostate and ovary, but at low or undetectable levels in a number of human breast cancer cell lines. It is a member of a superfamily of epithelial membrane proteins (EMPs), which may have multiple potential functions, including maintenance and regulation of cell polarity and permeability, perhaps through mechanisms involving tight junctions, (ibid). First identified by Furuse et al., J Cell Biol 141: 1539-50, (1998), SEMP1 expression in normal human mammary epithelial cells, in contrast to low or undetectable levels of expression in a number of breast tumors and breast cancer cell lines, may indicate this protein as a possible tumor-suppressor gene, (Kramer et al., Hum Genet 107: 249-56, (2000)). Expression of this protein and tight junction morphology were altered in blood vessels of human glioblastoma multiforme, (Liebner et al., Acta Neuropathol 100 (3): 323-31, (2000)).

[0173] Neuroligin 1 (NLGN1)

[0174] NLGN1 was first identified as a neuronal cell surface protein and characterized as a splice site-specific ligand for beta-neurexins by Ichtchenko et al., Cell 81: 435-43, (1995). Neuroligin 1 binds to beta-neurexins only if they lack an insert in the alternatively spliced sequence of the G domain, not if they contain an insert. Findings support a model whereby alternative splicing of neurexins creates a family of cell surface receptors that confer interactive specificity-on their resident neurons, (ibid). It was also suggested that these proteins are part of the machinery employed during the formation and remodeling of CNS synapses, (Scheiffele et al., Cell 101: 657-69, (2000)). Cloned by Kikuno et al., DNA Res 6: 197-205, (1999), neuroligen 1 expression in mammary carcinomas may reflect deregulated gene expression. As carcinomas regressed in a study by Ariazi et al., J Biol Chem 271: 29286-94, (1996), neuroligen 1 expression was repressed or turned off, which is consistent with regulated gene expression in most normal tissue.

[0175] Extraneuronal Monoamine Transporter (EMT)

[0176] EMTs, polyspecific organic cation transporters in the liver, kidney, and intestine are critical for elimination of many endogenous amines as well as a wide array of drugs and environmental toxins. This gene was cloned from a human kidney carcinoma cell line by Grundemann et al., Nature Neurosci 1: 349-51, (1998). Northern blot analysis detected high level expression of the gene transcript in first-trimester and term placenta, skeletal muscle, prostate, aorta, liver, fetal lung, salivary gland, and adrenal gland. Moderate to low expression was detected in uterus, ovary, kidney, lymph node, lung, trachea, and fetal liver, (Verhaagh et al., Genomics 55: 209-18, (1999)). Wu et al., J. Biol Chem 273: 32776-86, (1998) suggested that this protein plays a significant role in the disposition of cationic neurotoxins and neurotransmitters in the brain. The first report of the extraneuronal monoamine transporter (uptake 2) was by Streich et al., Naunyn Schmiedebergs Arch Pharmacol 353(3): 328-33, (1996). Streich et al. reported that human glioma cells express this transporter and thus, glial cells in the human CNS endowed with this transporter are likely to contribute to the inactivation of neuronally released noradrenaline.

[0177] COLNOV1 (Homo Sapiens Hypothetical Protein MBC3205)

[0178] COLNOV1 was identified in The Cancer Genome Anatomy Project Database by the National Cancer Institute. It was cloned and submitted by Robert L. Strausberg to GenBank in September 2001 with no journal publication cited. Its function is not yet elucidated.

[0179] STEAP1

[0180] STEAP1 is a six transmembrane epithelial antigen of the prostate. The gene is expressed predominately in human prostate tissue and is up regulated in multiple cancer cell lines, including prostate, bladder, colon, ovarian, and Ewing sarcoma Hubert et al., Proc Natl Acad Sci 96: 14523-28, (1999). Study results support STEAP as a cell-surface tumor-antigen target for prostate cancer therapy and diagnostic imaging (ibid). The structure of the protein suggests a potential function as a channel or transporter protein. STEAP1 was first reported and cloned by Hubert et al (1999).

[0181] Claudin 2

[0182] Claudin 2 was first identified from a chicken liver by Furuse et al., J Cell Biol 141: 1539-50, (1998). It is an integral membrane protein localized at tight junctions. Research has concluded that claudins regulate the intestinal barrier in response to immune mediators, (Kinugasa et al., Gastroenterology 118(6): 1001-11, (2000)). It is not clear, but has been speculated that this protein as well as other tight junction proteins may play a role in the molecular mechanism of brain tumor edema, (Papadopoulos et al., Br J Neurosurg 15(2): 101-8, (2001)). Furose et al., J Cell Biol 153(2): 263-272, (2001) cloned the canine equivalent.

[0183] KIAA0779

[0184] KIAA0779 was first identified and cloned from human brain by Nagase et al., DNA Res 5(5): 277-86, (1998). It may be functionally related to cell signaling/communication, cell structure/motility and nucleic acid management, (ibid).

[0185] Decay Accelerating Factor for Complement (CD55, DAF)

[0186] CD55 is a 70-kD glycoprotein that aids host tissues to avoid attack by autologous complement proteins. DAF interrupts the complement sequence at an early step in activation, effectively halts progression of the cascade and prevents consequent cell injury. DAF is expressed on the plasma membrane of all cell types that are in intimate contact with plasma complement proteins, (Koretz et al., Br J Cancer 66: 810-814, (1992). Cloned and characterized by Medof et al., Proc Nat Acad Sci 84: 2007-11, (1987), DAF can also act as a signal-transducing molecule. With monoclonal antibodies directed against DAF, human monocytes can be activated in vitro, (Shibuya et al., J Immunol 149: 1758-62, (1992)). Hensel et al., Laboratory Investigation 81: 1553-63, (2001) have isolated a human antibody SC-1, from a patient with a signet ring cell carcinoma of the stomach which induced apoptosis of gastric cancer cells in vitro and is being used successfully in clinical trials, (Vollmers, et al., Oncol Rep 5: 549-52, (1988)). The target for the antibody was discovered to be a modified DAF protein, (Hensel, et al, (2001)). DAF is over expressed on various tumors such as breast, colon, and stomach carcinoma, (Koretz et al., (1992)). Nowicki et al., Am J Reprod Immunol 46(2): 144-8, (2001), have reported that expression of DAF in endometrial adenocarcinoma is inversely related to the stage of tumor. This is consistent with the hypothesis that early stage endometrial adenocarcinoma that is exposed to complement attack may up-regulate DAF to protect malignant cells from complement lysis.

[0187] OATPRP1 (Solute Carrier Family 21 (Organic Anion Transporter), Member 12

[0188] OATPRP1 was submitted to GenBank Nov. 16, 1999 by Wu et al., (unpublished) as part of identification and characterization of novel human OATP family members.

[0189] NKCC1 (Solute Carrier Family 12, Member 2; SLC12A2)

[0190] The Na—K—Cl cotransporter, NKCC1 aids transcellular movement of chloride across both secretory and absorptive epithelia. It is reportedly expressed in many tissues, including the basolateral membrane of secretory epithelia where it mediates active chloride secretion, (Quaggin et al., Mamm Genome 6 (8): 55778, (1995)). Specifically, this protein is a bumetanide-sensitive Na—K—Cl cotransporter first discovered by Xu et al., Proc Natl Acad Sci 91: 2201-05, (1994). Cloned and characterized by Payne et al., J Biol Chem 270: 17977-85, (1995), the authors proposed that the NKCC1 gene is involved in the control of normal cell proliferation, while its overexpression results in apparent cell transformation, in a manner similar to some protooncogenes, (Panet et al., J Cell Phys 182: 109-18, (2000)).

[0191] PEM (Polymorphic Epithelial Mucin; Mucin 1, MUC1; Peanut-Reactive Urinary Mucin; PUM Mucin; Tumor-Associated Epithelial PEM)

[0192] PEM is a large cell surface mucin glycoprotein expressed by most glandular and ductal epithelial cells and some hematopoietic cell lineages. It has a tandem repeat domain that is highly O-glycosylated and alterations in glycosylation have been shown in epithelial cancer cells. PEM was first identified by Karlsson et al., (Ann Hum Genet 47: 263-9, (1983)) as a polymorphism identified from human urinary mucin by SDS polyacrylamide gel electrophoresis followed by detection with radiolabelled lectins. Peanut agglutinin was the most effective lectin; hence one of the proposed names. It is expressed in other normal and malignant tissues of epithelial origin including the mammary gland. This protein is developmentally regulated and aberrantly expressed in breast cancer, (Gendler et al, J Biol Chem 265: 15286-93, (1990)). Individuals with small PEM alleles/genotypes have an increased risk for development of gastric carcinoma, (Silva, et al., Eur J Hum Genet 9(7): 548-52, (2001)). PEM is activated in B-cell lymphoma by translocation and is rearranged and amplified in B-cell lymphoma subsets, (Dyomin, et al., Blood 95: 2666-71, (2000)). PEM was cloned and characterized by Gendler, et al., (1990).

[0193] NRAMP2 (Natural Resistance-Associated Macrophage Protein 2; Divalent Cation Transporter 1; DCT1; Divalent Metal Transporter 1; DMTI; Solute Carrier Family 11 (Proton-Coupled Divalent Metal Ion Transporter), Member 2: SLC11A2

[0194] NRAMP2 was first identified in the mouse genome by Gruenheid et al., Genomics 25: 514-25, (1995). Human NRAMP2 was isolated and characterized by Vidal et al., Mammalian Genome 6: 224-30, (1995). Its function is mediation of active transport that is proton-coupled and dependent on the cell membrane potential. It is up regulated by dietary iron deficiency and may represent a key mediator of intestinal iron absorption, (Gunshin et al., Nature 388: 482-88, (1997); Tandy, et al., J Biol Chem 275(2): 1023-29, (2000)).

[0195] Integrin, Beta-4 (ITGB4)

[0196] Integrin beta 4 was first identified, characterized, and cloned by Suzuki, et al., EMBO J. 9(3):757-63, (1990). Integrins are transmembrane glycoprotein receptors that mediate cell-matrix or cell-cell adhesion, and transduce signals that regulate gene expression and cell growth, (Vidal et al., Nature Genet 10:229-34, (1995)). Integrins are heterodimeric molecules that consist of noncovalently linked alpha and beta subunits. Alpha-6/beta-4 is restricted to the ventral surface opposed to the basal membrane zone, suggestive of its role in cell-matrix adhesion. Consistent with this possibility, alpha-6/beta-4 is found to be associated with the hemidesmosomes in stratified and transitional epithelia, (ibid). The cytoplasmic domain of the integrin beta-4 subunit mediates both association with the hemidesmosomal cytoskeleton and recruitment of the signaling adaptor protein SHC. This integrin is a receptor for the laminins, and likely plays a role in invasive carcinomas. Shaw et al., Cell 91: 949-60, (1997) demonstrated in the MDA-MB435 breast carcinoma cell line, that the alpha-6/beta-4 integrin promotes carcinoma invasion through a preferential and localized targeting of phosphoinositide-30H kinase (P13K) activity. Expression of alpha-6/beta-4 integrin has been shown to increase during malignant conversion of mouse epidermal keratinocytes, (Gomez et al., Exp Cell Res 201: 250-61, (1992)).

[0197] HTK Ligand (Hepatoma Transmembrane Kinase Ligand; EPH-Related Receptor Tyrosine Kinase Ligand 5: EPLG5; Ligand of EPH-Related kinase 5; LERK5; HTKL; EPHRIN B2; EFNB2)

[0198] EPHRIN B2 was first reported by Carpenter, et al., J Neurosci Res 42(2): 199-206, (1995) and cloned from hematopoietic monocytic lineage by Bennett et al., Proc Natl Acad Sci 92(6): 1866-70, (1995). Studies by Sakano, et al., Oncogene 13(4): 813-22, (1996) suggest the involvement of the HTK-HTKL system in the proliferation of HTK+ hematopoietic progenitor cells in the hematopoietic environment. According to Bennett et al., (1995), this ligand and its receptor are widely expressed and may function in a variety of tissues. HTK ligand is reportedly expressed in adult lung and kidney and in fetal heart, lung, kidney, and brain, (Cerretti et al., Immun 32: 1197-1205, (1995)). Unlike most of its family members, the ligand's receptor doesn't appear to be expressed in the CNS. However, similar to other members, it is expressed in primary epithelia and epithelial cell-derived lines, (Bennett et al., (1995)). The HTK-HTKL interaction may represent an early step in the initiation of synapse formation or maturation and may potentiate the ability of the receptor to respond to activity-dependent signals from the extracellular milieu, (Takasu, et al., Science 295: 491-95, (2002)). It is reported that HTK ligand transcripts are highly expressed in several small lung cell carcinoma cell lines and may modulate the biological behavior of these cells through autocrine and/or juxtacrine activation, (Tang et al., Hum Mol Genet 4: 2033-45, (1995)). Increased HTKL expression possibly reflects or induces an increased potential for growth, tumorigenicity, and metastatic abilities in human melanomas. The HTK-HTKL system could be a potential new source for molecular markers as well as a target for new therapies, (Vogt, et al., Clin Cancer Res 4(3): 791-7, (1998)). Studies by Liu et al., Cancer 94(4): 934-9, (2002) demonstrate that the ligand is expressed differentially in colon carcinoma and normal mucosa specimens and thus may play a role in the progression of colon carcinoma.

[0199] T245 Protein (T245: TM4SF6; Transmembrane 4 Superfamily Member 6)

[0200] Several TM4SF proteins have been shown to stimulate or modulate cell growth, (Bell et al., J Exp Med 175: 527-536, (1992); Higashiyama et al., J Cell Biol 128: 929-938, (1995); Lebel-Binay et al., J Immunol 155: 101-110, (1995); Maecker et al., FASEB J 11: 428-442, (1997)). Some may associate with integrins and control cell adhesion and movement, (Hadjiargyrou et al., J Neurochem 67: 2505-2513, (1996); Hemler et al., Biochem Biophys Acta 1287: 67-71, (1996); Maecker et al., (1997)). TM4SF6 was identified, cloned, and characterized from a human glioma by Maeda et al., Genomics 52: 240-242, (1998). Gene expression is reportedly widely found in human adult tissues. Among the tissues with high-level expression are the liver, pancreas, kidney, and ovary, while low-level expression was observed in the skeletal muscle, lung, and brain, (Maeda et al., (1998

[0201] Carcinoembryonic Antigen-Related Cell Adhesion Molecule 5 (CEACAM 5)

[0202] CEACAM5 was first described by Gold and Freedman, J Exp Med 121: 439-62, (1965) as a complex immunoreactive glycoprotein comprised of 60% carbohydrate. It is found in adenocarcinomas of endodermally derived digestive system epithelia and in fetal colon. The CEA immunoassay is useful in the diagnosis and serial monitoring of cancer patients for recurrent disease or response to therapy, particularly in colon cancer. CEACAM5 was isolated and characterized by Zimmermann et al., Proc Nat Acad Sci 84: 2960-64, (1987). The CEA gene was renamed CEACAM5, (Beauchemin et al., Exp Cell Res 252: 243-49, (1999)).

[0203] Protocadherin-9 (PCDH9)

[0204] Protocadherin-9 is a member of the cadherin superfamily. Protocadherins are a subfamily of calcium-dependent cell adhesion and recognition proteins. PCDH9 was first isolated and identified by Strehl et al., Genomics 53: 81-89, (1998) from a human fetal brain library. It is closely related to PCDH1 and PCDH7. Like other protocadherins, PCDH9 is predominately expressed in fetal and adult brain. They have a developmentally regulated expression pattern in brain that suggests this protein directs various aspects of morphogenesis, (Strehl et al., (1998

[0205] Monocarboxylate Transporter (MCT3)

[0206] The function of the proton-linked monocarboxylate transporter family is transport of substances across the plasma membrane. For example, lactic acid and pyruvate are transported via members of this family. Each member of the family appears to have slightly different substrate and inhibitor specificities and transport kinetics, which are related to the metabolic requirements of the tissues in which they are found. MCT3 was identified, cloned, and sequenced by Price et al, Biochem J 329: 321-28, (1998). MCT3 appears to be the MCT isoform expressed most in muscle fibers where energy metabolism is mainly glycolytic. It is a major route for lactic acid efflux from skeletal muscle and other cells, (Wilson, et al., J Biol Chem 273: 15920-26, (1998)). MCT3 is also found in retinal pigment epithelia, where it transports lactate between two tissue compartments, the interphotoreceptor matrix and the choriocapillaris, (Yoon et al., Biochem Biophys Res Comm 234: 90-94, (1997

[0207] Osteopontin (Secreted Phosphoprotein 1; SPP1: OPN: Bone Sialoprotein: Urinary Stone Protein)

[0208] Osteopontin is the principal phosphorylated glycoprotein of bone and is expressed in a limited number of other tissues including dentine, (Crosby et al., Genomics 27: 155-160, (1995)). Osteopontin is produced by osteoblasts under stimulation by calcitrol and binds tightly to hydroxyapatite. It has been shown to be involved in the anchoring of osteoclasts to the mineral of bone matrix, (Reinholt et al., Proc Nat Acad Sci 87: 4473-75, (1990)). Urinary calcium oxalate stones also consist of this protein, (Kohri et al., J Biol Chem 268: 15180-84, (1993)). Osteopontin is a constitutive component of normal elastic fibers in human skin and aorta. It has been suggested that it plays a role in modulating crystal nucleation and growth in mineralizing tissues and, more generally, in conditions in which mineral precipitation should be controlled, (Baccarini-Contri et al., Matrix Biol 14: 553-560, (1994)). This protein has been implicated in a number of pathologies, including but not limited to breast, colon, prostate, and lung cancers. There is evidence that osteopontin enhances malignancy, and that signaling pathways directly induced by this protein, as well as interactions with growth factor receptor pathways, can combine to activate expression of genes and functions that contribute to metastasis, (Furger et al., Curr Mol Med 1(5): 621-32, (2001)). Recent clinical evidence also suggests that osteopontin levels in cancer patients' blood or tumors may help provide prognostic information. The earliest report of this protein was by Oldberg, et al., Proc Natl Acad Sci 83 (23): 8819-23 (1986) where they cloned and sequenced osteopontin from a rat. The human gene was cloned and sequenced by Kiefer et al., Nucleic Acids Res 17: 3306, (1989).

[0209] Voltage-Gated Potassium Channel, KQT-Like Subfamily, Member 1 (KCNQ1)

[0210] KCNQ1 is a member of the largest and most diversified class of ion channels. Their main functions are associated with the regulation of the resting membrane potential and the control of the shape and frequency of action potentials. These channels are made up of multimeric proteins containing alpha subunits, which are directly responsible for channel activity, and gamma subunits, which modify the basic channel activity. KCNQ1 was first identified, cloned, and characterized by Want et al., Nat Genet 12 (1): 17-23, (1996). This specific protein is essential for the repolarization phase of the cardiac action potential and for K+ homeostasis in the inner ear, (Neyroud et al., Circ Res 84: 290-97, (1999)). Northern blot analyses and in situ hybridization indicate that KCNQ1 is expressed in kidney, pancreas, lung, placenta, inner ear, and in heart with the highest level of expression, (Sanguinetti et al., Nature 384: 80-83, (1996); Wang et al., Nat Genet 12: 17-23, (1996); Neyroud et al., Nat Genet 15: 186-89, (1997)). This gene is located on 11p15.5, in a large domain of contiguous genes abnormally imprinted in cancer and with Beckwith-Wiedemann syndrome, (Lee et al., Nat Genet 15: 181-85, (1997)). Mutations in KCNQ1 are the most frequent cause of the long-QT syndrome (LQTS), which is an inherited cardiac disorder that predisposes individuals to syncope, seizures, and sudden cardiac death from ventricular tachyarrhythmias, (Schwartz, et al., Am Heart J 89: 378-90, (1975)).

[0211] Epican

[0212] Epican is a heparin sulfate proteoglycan. This protein has a novel 339 amino acid domain inserted into the proximal extracellular domain of the standard, leukocyte form of CD44. It was first identified and characterized as a proteoglycan on human keratinocytes by Haggerty et al., J Invest Dermatol 99 (4): 374-80, (1992) and given the name epican, which stands for epidermal intercellular proteoglycan. Epican is expressed on the outer cell surface of squamous-cell carcinomas and can be a target for other tumors as well, (Van Hal, et al., Int J Cancer 68 (4): 520-27, (1996)).

[0213] Membrane Cofactor Protein (CD46; MCP; Measles Virus Receptor)

[0214] The level of complement activation on cell membranes is regulated by the expression of membrane-bound complement regulatory proteins, which protect normal and tumor cells from uncontrolled complement-mediated injury, (Gorter and Meri, Immunol Today 20: 576-582, (1999)). Membrane cofactor protein is one of these regulatory proteins. Several studies have shown that in situ tumor cells overexpress CD46, (Koretz et al., Br J Cancer 66: 810-814, (1992); Li et al., Br J Cancer 84: 80-86, (2001); Maenpaa et al., Am J Pathol 148: 1139-52, (1996); Niehans et al., Am J Pathol 149: 129-142, (1996); Yamakawa et al., Cancer 73: 2808-17, (1994)). The overexpression of this and other regulatory proteins of complement on tumor cells may prevent an efficient local immune response. According to Durrant and Spendlove in Curr Opin Investig Drugs 7:959-66, (2001), expression of the complement-regulatory proteins CD55, CD46 and CD59 are deregulated in cancer with tumors showing loss of one or more inhibitors and strong overexpression of others. This results in tumors that are resistant to attack by complement. Studies performed in vitro and in vivo have shown that tumor sensitivity to complement can be restored by co-administration of antibodies that bind to the functional domains of complement-regulatory proteins, (Durrant and Spendlove, (2001)). Sparrow et al., Hum Immunol 13: 83-93, (1985) first reported CD46 as HuLy-m5. Purcell et al., Immunogenetics 33: 335-44, (1991) isolated and cloned this protein.

[0215] Solute Carrier Family 6 Member 6 (Neurotransmitter Transporter, Taurine; SLC6A6)

[0216] Taurine is a major intracellular amino acid in mammals. It is involved in bile acid conjugation in hepatocytes, modulation of calcium flux and neural excitability, osmoregulation, detoxification, and membrane stabilization. The taurine transporter (SLC6A6) has considerable amino acid sequence similarity to sodium- and chloride-dependent transporters, (Uchida et al., Proc Nat Acad Sci 89: 8230-34, (1992)). Ramamoorthy et al., Biochem J 300: 893-900, (1994) cloned and characterized this gene from human placenta. Northern blot analysis by Ramamoorthy et al., (1994) revealed that the principal transcript is expressed abundantly in placenta and skeletal muscle, at intermediate levels in heart, brain, lung, kidney, and pancreas; while at low levels in liver. Cultured human cell lines from placenta, intestine, cervix, and retinal pigment epithelia also contain the transcript.

[0217] Osteoblast Specific Factor 2, OSF-2os: Periostin

[0218] This protein shares structural and sequence homology with fasciclin I, which is an insect adhesion molecule, (Takeshita et al., Biochem J 294: 271-278, (1993)). There is substantial evidence to suggest that cell-cell and cell-matrix adhesive interactions play a crucial role in tumorigenesis, tumor progression, and in particular metastasis, (Albeda, Lab Invest 68: 4-17, (1993); Tuszynski, et al., Acta Haematol 97: 29-39, (1997)). It has been observed that periostin was over expressed ten-fold in glioblastoma compared to normal brain tissue and the gene is overexpressed in several human tumors including carcinomas of ovary, breast and brain, (Lal et al., Cancer Res 59: 5403-07, (1999)). This protein is also over expressed in ovarian tumors as well, (Ismail et al., Cancer Res 60: 6744-49, (2000)). Results by Sasaki et al., Cancer Letters 172: 37-42, (2001) show that the periostin gene is highly expressed in the surrounding stromal cells of breast and lung cancer tissue but not within the tumor by in situ RNA hybridization, suggesting that expression of periostin may be involved in tumor invasion. This gene was first cloned and characterized by Takeshita et al., (1993). Periostin is expressed in bone and to a lesser extent in the lung, but not other tissues.

[0219] CEACAM8 (CGM6, CD66b, NCA-95, NCA-W272)

[0220] CEACAM8 is a member of the CEA gene family of cell adhesion molecules, which is primarily expressed in neutrophils and eosinophils (Eades-Perner et. al., (1998) Blood 91: 663-672). Two groups reported the cloning of the gene for CEACAM8 in 1990. Berling et. al. ((1990) Cancer Res 50:6534-6539) cloned the gene from a library constructed from a CML patient and Arakawa et. al. ((1990) BBRC 166:1063-1071) identified the same gene from a library prepared from normal human peripheral white blood cells.

[0221] FGFR3

[0222] Fibroblast Growth Factor Receptor 3 (“FGFR3”) is a member of the fibroblast growth factor receptor (“FGFR”) family of the receptor tyrosine kinase proteins (RTK's). Fibroblast growth factor receptors mediate growth, differentiation and cellular migration in a diverse range of cell types. Hart, K. C., et al., Mol. Biol. Cell., 12:931-941, 2001. Fibroblast growth factor (“FGF”) signaling plays a role in mitogenesis, mesoderm induction, neuronal survival and neuritic extension, tumor angiogenesis, and atherosclerosis, Pandit, S. G., et al., Biochem. J., 361:231-241, 2002. Ligand binding to the extracellular domain of the FGFR receptors induces receptor dimerization and transphosphorylation of tyrosine residues in the intracellular domains of the receptors. Links between FGFR3 and cancer has recently been uncovered (Hart, K. C., et al., Mol. Biol. Cell., 12:931-941, 2001; Pandit, S. G., et al., Biochem. J., 361:231-241, 2002). In 1990, FGFR3 was reported by Elena B. Pasquale as cek2, one of two novel kinases present in chicken embryos that were homologous to cek1, a chicken fibroblast growth factor receptor, Pasquale, E. B., Proc. Natl. Acad. Sci. USA, 87:5812-5816, 1990. In 1991, Keegan et al. (Natl. Acad. Sci. USA, 88:1095-1099, 1991) reported the isolation of the gene. The cDNA was sequenced in its entirety and designated as Fibroblast Growth Factor Receptor 3 (FGFR3), Anti-FGFR antibodies were first reported at least as earlier as 1991 (Bellot et al. EMBO J., 10:2849-2854, 1991). In 1991, Keegan et al. Oncogene, 6:2229-2236, 1991) attempted to create an antibody specific for FGFR3 but encountered significant difficulties in obtaining an antibody that did not cross react with other FGFR receptors.

[0223] GPR56 (TM7XN1, TM7LN4, EGF TM7-Like cDNA)

[0224] GPR56, also known as TM7XN1, TM7LN4 or as EGF TM7-like cDNA, is a novel g-protein coupled receptor (GPR) independently identified by two separate groups of research scientists in 1999 (Liu, M., et al. Genomics, 55:296-305, 1999: Zendman, A. J. W., et al., FEBS Letters, 446:292-298, 1999). GPR56, like other g-protein coupled receptors, is dominated by a seven transmembrane (TM7) domain consisting of seven hydrophobic stretches of amino acids, each forming a transmembrane domain that traverses the plasma membrane of the cell. These domains are highly conserved among the various g-protein coupled receptors. The function of a g-protein coupled orphan receptors remains unidentified. However, the presence of mucin-like and/or EGF-like domains suggests that GPR56 is involved in cell-cell binding. While GPR56 lacks the EGF domains, reports suggest that it may be involved in cell-cell adhesion through glycosylation of its N-terminal domain.

[0225] P Cadherin (Placental Cadherin, PCAD, Cadherin-3, CDH3 or CDHP)

[0226] Cadherins are a superfamily of transmembrane proteins regulating cell-cell adhesion during development and tissue homeostasis (Gumbiner, B. M., J. Cell. Biol., 148:399-404, 2000; Yagi, T. and Takeichi, M., Genes Dev., 14:1169-1180, 2000). Cadherins have five extracellular Ca2+ binding domains and a small cytoplasmic domain that is highly conserved among the classical cadherins. P-cadherin expression is often altered in only a subset of a given type of tumor. It is known that P-cadherin is upregulated in inflammatory bowel diseases such as Crohn's disease and colitis. Aberrant P-cadherin expression has been associated with cell proliferation and dedifferentiation in breast cancer (Gamallo, C., Modern Pathology, 14:650-654, 2001). Human P-cadherin was reported to be the antigen recognized by the NCC-CAD-299 monoclonal antibody raised against a vulvar epidermoid carcinoma (Shimoyama, Y., et al., Cancer Res., 49-2128-2133, 1989). The human gene was isolated by Shimoyama, Y., et al., J. Cell Biol., 109:1787-1794, 1989).

[0227] RON kinase

[0228] RON (Recepteur d'Origine Nantais) is a receptor protein tyrosine kinase belonging to the hepatocyte growth factor (“HGF”) receptor family. Protein tyrosine kinases are enzymes that transfer the terminal phosphate of adenosine triphosphate (ATP) to a specific tyrosine residue on a target protein. These enzymes are found in all multicellular organisms and play a central role in the regulation of cellular growth and in the differentiation of complex eukaryotes. There are two major classes of tyrosine kinases: transmembrane receptor tyrosine kinases and non-receptor tyrosine kinases. Transmembrane receptor tyrosine kinases are activated directly by binding of peptide growth factors and cytokines to their extracellular domains. Tyrosine kinases that fall within this class include the receptor for hepatocyte growth factor. The normal function of the receptor is to act as transducer of extracellular signals. The Ron gene encodes a 190 kDa protein, the mature form being a disulfide-linked heterodimer. RON comprises a 40-kD extracellular α chain and a 150-kD β chain having an intracellular protein tyrosine kinase domain, the activity of which is increased by ligand-receptor binding (Leonard, E. J. and Danilkovitch, A., Advances in Cancer Research, 2000, 139-165).

[0229] KIAA0792

[0230] KIAA0792 is a gene of unknown function, primarily expressed in the kidney, brain, ovary, lung and pancreas. The KIAA0792 transcript has been mapped to human chromosome 1 at position Iq42.13. The KIAA0792 locus contains 25 exons spread over 36,774 base pairs of genomic DNA. KIAA0792 consists of a 4074 nucleotide sequence encoding a protein of 807 amino acids. The sequences are available in Genbank, Accession Number AB018335. The protein encoded by KIAA0792 may contain as many as ten transmembrane domains, positioned at amino acids 67-89, 166-188, 212-234, 446-468, 487-509, 528-550, 583-605, 635-657, 689-711, and 717-739. In addition to these transmembrane domains, at least one other recognized domain, DUF221, is located at position numbers 356-806. This domain is present in a number of other putative transmembrane proteins of unknown function.

[0231] The present invention discloses genes that have not previously been reported to be over-expressed in human tumor tissue compared to corresponding normal tissue: SEQ ID NO:5; SEQ ID NO:8; SEQ ID NO:9; SEQ ID NO:16; SEQ ID NO:17; SEQ ID NO:19; SEQ ID NO:20; SEQ ID NO:22; SEQ ID NO:25; SEQ ID NO:26; SEQ ID NO:28; SEQ ID NO:29; SEQ ID NO:32; SEQ ID NO:35; and SEQ ID NO:3113.

[0232] The present invention also discloses genes that have previously been reported to be over-expressed in human tumor tissue but not specifically in colon tumors: SEQ ID NO:2; SEQ ID NO:3; SEQ ID NO:4; SEQ ID NO:10; SEQ ID NO:11; SEQ ID NO:15; SEQ ID NO:33; SEQ ID NO:34; SEQ ID NO:37.

[0233] Polypeptides

[0234] Another embodiment of the invention is an isolated polypeptide comprising an amino acid sequence selected from the group consisting of:
[0235] (a) a mature form of an amino acid sequence selected from the group consisting of SEQ ID NO:39; SEQ ID NO:40; SEQ ID NO:41; SEQ ID NO:42; SEQ ID NO:43; SEQ ID NO:46; SEQ ID NO:47; SEQ ID NO:48; SEQ ID NO:49; SEQ ID NO:53; SEQ ID NO:54; SEQ ID NO:55; SEQ ID NO:56; SEQ ID NO:57; SEQ ID NO:58; SEQ ID NO:59; SEQ ID NO:60; SEQ ID NO:61; SEQ ID NO:62; SEQ ID NO:63; SEQ ID NO:64; SEQ ID NO:65; SEQ ID NO:66; SEQ ID NO:67; SEQ ID NO:68; SEQ ID NO:70; SEQ ID NO:71; SEQ ID NO:72; SEQ ID NO:73; SEQ ID NO:74; SEQ ID NO:75; and SEQ ID NO:3114;
[0236] (b) a variant of a mature form of an amino acid sequence selected from the group consisting of SEQ ID NO:39; SEQ ID NO:40; SEQ ID NO:41; SEQ ID NO:42; SEQ ID NO:43; SEQ ID NO:46; SEQ ID NO:47; SEQ ID NO:48; SEQ ID NO:49; SEQ ID NO:53; SEQ ID NO:54; SEQ ID NO:55; SEQ ID NO:56; SEQ ID NO:57; SEQ ID NO:58; SEQ ID NO:59; SEQ ID NO:60; SEQ ID NO:61; SEQ ID NO:62; SEQ ID NO:63; SEQ ID NO:64; SEQ ID NO:65; SEQ ID NO:66; SEQ ID NO:67; SEQ ID NO:68; SEQ ID NO:70; SEQ ID NO:71; SEQ ID NO:72; SEQ ID NO:73; SEQ ID NO:74; SEQ ID NO:75; and SEQ ID NO:3114, wherein one or more amino acid residues in said variant differs from the amino acid sequence of said mature form, provided that said variant differs in no more than 20%, of the amino acid residues from the amino acid sequence of said mature form;
[0237] (c) an amino acid sequence comprising a sequence selected from the group consisting of SEQ ID NO:39; SEQ ID NO:40; SEQ ID NO:41; SEQ ID NO:42; SEQ ID NO:43; SEQ ID NO:46; SEQ ID NO:47; SEQ ID NO:48; SEQ ID NO:49; SEQ ID NO:53; SEQ ID NO:54; SEQ ID NO:55; SEQ ID NO:56; SEQ ID NO:57; SEQ ID NO:58; SEQ ID NO:59; SEQ ID NO:60; SEQ ID NO:61; SEQ ID NO:62; SEQ ID NO:63; SEQ ID NO:64; SEQ ID NO:65; SEQ ID NO:66; SEQ ID NO:67; SEQ ID NO:68; SEQ ID NO:70; SEQ ID NO:71; SEQ ID NO:72; SEQ ID NO:73; SEQ ID NO:74; SEQ ID NO:75; and SEQ ID NO:3114; and
[0238] (d) a variant of an amino acid sequence comprising a sequence selected from the group consisting of SEQ ID NO:39; SEQ ID NO:40; SEQ ID NO:41; SEQ ID NO:42; SEQ ID NO:43; SEQ ID NO:46; SEQ ID NO:47; SEQ ID NO:48; SEQ ID NO:49; SEQ ID NO:53; SEQ ID NO:54; SEQ ID NO:55; SEQ ID NO:56; SEQ ID NO:57; SEQ ID NO:58; SEQ ID NO:59; SEQ ID NO:60; SEQ ID NO:61; SEQ ID NO:62; SEQ ID NO:63; SEQ ID NO:64; SEQ ID NO:65; SEQ ID NO:66; SEQ ID NO:67; SEQ ID NO:68; SEQ ID NO:70; SEQ ID NO:71; SEQ ID NO:72; SEQ ID NO:73; SEQ ID NO:74; SEQ ID NO:75; and SEQ ID NO:3114, wherein one or more amino acid residues in said variant differs from the amino acid sequence, provided that said variant differs in no more than 20% of amino acid residues from said amino acid sequence.

[0239] In one aspect of the invention the SEQ ID NO:39; SEQ ID NO:40; SEQ ID NO:41; SEQ ID NO:42; SEQ ID NO:43; SEQ ID NO:46; SEQ ID NO:47; SEQ ID NO:48; SEQ ID NO:49; SEQ ID NO:53; SEQ ID NO:54; SEQ ID NO:55; SEQ ID NO:56; SEQ ID NO:57; SEQ ID NO:58; SEQ ID NO:59; SEQ ID NO:60; SEQ ID NO:61; SEQ ID NO:62; SEQ ID NO:63; SEQ ID NO:64; SEQ ID NO:65; SEQ ID NO:66; SEQ ID NO:67; SEQ ID NO:68; SEQ ID NO:70; SEQ ID NO:71; SEQ ID NO:72; SEQ ID NO:73; SEQ ID NO:74; SEQ ID NO:75; and SEQ ID NO:3114. SEQ ID NO:39; SEQ ID NO:56; SEQ ID NO:59; SEQ ID NO:61; SEQ ID NO:62; SEQ ID NO:65; and SEQ ID NO:68

[0240] Forms of a protein of the present invention can be recovered from culture medium or from host cell lysates. If membrane-bound, it can be released from the membrane using a suitable detergent solution (e.g. Triton-X 100) or by enzymatic cleavage. Cells employed in expression of polypeptide can be disrupted by various physical or chemical means, such as freeze-thaw cycling, sonication, mechanical disruption, or cell lysing agents.

[0241] It can be desired to purify a protein of the present invention from recombinant cell proteins or polypeptides. The following procedures are exemplary of suitable purification procedures: by fractionation on an ion-exchange column; ethanol precipitation; reverse phase HPLC; chromatography on silica or on a cation-exchange resin such as DEAE; chromatofocusing; SDS-PAGE; ammonium sulfate precipitation; gel filtration using, for example, Sephadex G-75; protein A Sepharose columns to remove contaminants such as IgG; and metal chelating columns to bind epitope-tagged forms of the a protein of the present invention. Additionally, other purification methods known to those skilled in the art can be used. Various methods of protein purification can be employed and such methods are known in the art and described for example in Deutscher, Methods in Enzymology, 182 (1990); Scopes, Protein Purification: Principles and Practice, Springer-Verlag, New York (1982). The purification step(s) selected will depend, for example, on the nature of the production process used and the particular protein produced.

[0242] Polypeptide Variants

[0243] In addition to the full-length native sequence polypeptides described herein, variants with functions similar to those of the polypeptides disclosed can be prepared. Variants can be prepared by introducing appropriate nucleotide changes into the DNA, and/or by synthesis of the desired polypeptide. Those skilled in the art will appreciate that amino acid changes can alter post-translational processing of a protein of the present invention, such as changing the number or position of glycosylation sites or altering the membrane anchoring characteristics. Variations in the native full-length sequence or in various domains of the a protein of the present invention described herein, can be made, for example, using any of the techniques and guidelines for conservative and non-conservative mutations set forth, for instance, in U.S. Pat. No. 5,364,934. Variations can include the substitution, deletion or insertion of one or more codons encoding the protein of the present invention that results in a change in the amino acid sequence of the a protein of the present invention as compared with the native sequence. Optionally, the variation is by substitution of at least one amino acid with any other amino acid in one or more of the domains of the polypeptides. Guidance in determining which amino acid residue can be inserted, substituted or deleted without adversely affecting the desired activity can be found by comparing the sequence of the polypeptide with that of homologous known protein derived from other mammals, and minimizing the number of amino acid sequence changes made in regions of high homology. Amino acid substitutions can be the result of replacing one amino acid with another amino acid having similar structural and/or chemical properties, such as the replacement of a leucine with a isoleucine. Such substitutions are known as conservative amino acid replacements. Insertions or deletions are, optionally, in the range of about 1 to 5 amino acids. The variation allowed can be determined by systematically making insertions, deletions or substitutions of amino acids in the sequence and testing the resulting variants for activity exhibited by the full length or mature native sequence.

[0244] In particular embodiments, conservative substitutions of interest are shown in Table 2 under the heading of preferred substitutions. If such conservative substitutions result in a change in biological activity, then more substantial changes, denominated exemplary substitutions in Table 2, or as further described below in reference to amino acid classes, are introduced and the products screened for activity.

[0245] Substantial modifications in function or immunological identity of the polypeptide are accomplished by selecting substitutions that differ significantly in their effect on maintaining (a) the structure of the polypeptide backbone in the area of the substitution, for example, as a sheet or helical conformation, (b) the charge or hydrophobicity of the molecule at the target site, or (c) the bulk of the side chain. Naturally occurring residues can be divided into groups based on common side-chain properties: (1) hydrophobic: norleucine, met, ala, val, leu, ile; (2) neutral hydrophilic: cys, ser, thr; (3) acidic: asp, glu; (4) basic: asn, gln, his, lys, arg; (5) residues that influence chain orientation: gly, pro; and (6) aromatic: trp, tyr, phe.

[0246] Non-conservative substitutions will entail exchanging a member of one of these classes for another class. Such substituted residues also can be introduced into the conservative substitution sites or, more preferably, into the remaining (non-conserved) sites.

[0247] The variations can be made using methods known in the art such as oligonucleotide mediated (site-directed) mutagenesis, alanine scanning, and PCR mutagenesis. Site-directed mutagenesis (See Carter et al., Nucl. Acids Res., 13:4331 (1986); Zoller et al., Nucl. Acids Res., 10:6487 (1987)), cassette mutagenesis (See Wells et al., Gene, 34:315 (1985)), restriction selection mutagenesis (See Wells et al., Philos. Trans. R. Soc. London SerA, 317:415 (1986)) or any other known techniques can be performed on the cloned DNA to produce the variant DNA.

[0248] Scanning amino acid analysis can also be employed to identify one or more amino acids along a contiguous sequence. Among the preferred scanning amino acids are relatively small, neutral amino acids. Such amino acids include alanine, glycine, serine, and cysteine. Alanine is typically a preferred scanning amino acid among this group because it eliminates the side-chain beyond the beta-carbon and, thus, is less likely to alter the main-chain conformation of the variant (See Cunningham and Wells, Science, 244: 1081-1085 (1989)). Alanine is also typically preferred because it is the most common amino acid. Further, it is frequently found in both buried and exposed positions (See Creighton, The Proteins, (W. H. Freeman & Co., N.Y.); Chothia, J. Mol. Biol., 150:1 (1976)). However, if alanine substitution does not yield adequate amounts of variant, an isosteric amino acid can be used.

[0249] Fragments of the protein of the present invention can be prepared by any of a number of conventional techniques. Desired peptide fragments can also be chemically synthesized. An alternative approach involves generating fragments by enzymatic digestion, e.g., by treating the protein with an enzyme known to cleave proteins at sites defined by particular amino acid residues, or by digesting the DNA with suitable restriction enzymes and isolating the desired fragment. Another suitable technique involves isolating and amplifying a DNA fragment encoding a desired polypeptide fragment, by polymerase chain reaction (PCR). Oligonucleotides that define the desired termini of the DNA fragment are employed at the 5′ and 3′ primers in the PCR. Preferably, polypeptide fragments share at least one biological and/or immunological activity with the native polypeptide.

[0250] Modifications of Polypeptides

[0251] Covalent modifications of a protein of the present invention are included within the scope of this invention. One type of covalent modification includes reacting targeted amino acid residues of a polypeptide with an organic derivatizing agent that is capable of reacting with selected side chains or the N- or C-terminal residues of the a protein of the present invention. Derivatization with bifunctional agents is useful, for instance, for crosslinking protein to a water-insoluble support matrix or surface for use in the method for purifying antibodies, and vice-versa. Commonly used crosslinking agents include e.g. 1,1-bis(diazoacetyl)-2-phenylethane glutaraldehyde, N-hydroxysuccinimide esters, for example, esters with 4-azidosalicylic acid, homobifunctional imidoesters, including disuccinimidyl esters such as 3,3′-dithiobis(succinimidylpropionate), bifunctional maleimides such as bis-N-maleimido-1,8-octane and agents such as methyl-3-[(pazidophenyl)dithio]propioimidate.

[0252] Other modifications include deamidation of glutaminyl and asparaginyl residues to the corresponding glutamyl and aspartyl residues, respectively, hydroxylation of proline and lysine, phosphorylation of hydroxyl groups of seryl or threonyl residues, methylation of the—amino groups of lysine, arginine, and histidine side chains (See T. E. Creighton, Proteins: Structure and Molecular Properties, W. H. Freeman & Co., San Francisco, pp. 79-86 (1983)), acetylation of the N-terminal amine, and amidation of any C-terminal carboxyl group.

[0253] Another type of covalent modification of the polypeptide included within the scope of this invention comprises altering the native glycosylation pattern of the polypeptide. “Altering the native glycosylation pattern” is intended for purposes herein to mean deleting one or more carbohydrate moieties found in the native sequence (either by removing the underlying glycosylation site or by deleting the glycosylation by chemical and/or enzymatic means), and/or adding one or more glycosylation sites that are not present in the native sequence. In addition, the phrase includes qualitative changes in the glycosylation of the native proteins, involving a change in the nature and proportions of the various carbohydrate moieties present. Addition of glycosylation sites to the polypeptide can be accomplished by altering the amino acid sequence. The alteration can be made, for example, by the addition of, or substitution by, one or more serine or threonine residues to the native sequence (for 0 linked glycosylation sites). The amino acid sequence can optionally be altered through changes at the DNA level, particularly by mutating the DNA encoding the polypeptide at preselected bases such that codons are generated that will translate into the desired amino acids.

[0254] Another means of increasing the number of carbohydrate moieties on the polypeptide is by chemical or enzymatic coupling of glycosides to the polypeptide. Such methods are described in the art, e.g., in WO 87/05330 published 11 Sep. 1987, and in Aplin and Wriston, CRC Crit. Rev. Biochem., pp. 259-306 (1981).

[0255] Removal of carbohydrate moieties present on the polypeptide can be accomplished chemically or enzymatically or by mutational substitution of codons encoding for amino acid residues that serve as targets for glycosylation. Chemical deglycosylation techniques are known in the art and described, for instance, by Hakimuddin, et al., Arch. Biochem. Biophys, 259:52 (1987) and by Edge et al., Anal. Biochem., 118:131 (1981). Enzymatic cleavage of carbohydrate moieties on polypeptides can be achieved by the use of a variety of endo- and exo-glycosidases as described by Thotakura et al., Meth. Enzymol., 138:350 (1987).

[0256] Another type of covalent modification of a protein or antibody of the present invention comprises linking the polypeptide or antibody to one of a variety of non-proteinaceous polymers, e.g., polyethylene glycol (PEG), polypropylene glycol, or polyoxyalkylenes, in the manner set forth in U.S. Pat. No. 4,640,835; 4,496,689; 4,301,144; 4,670,417; 4,791,192 or 4,179,337.

[0257] Functional groups capable of reacting with either the amino terminal α-amino group or ε-amino groups of lysines found on the polypeptide of the present invention, agonist, antagonist, or antibody include: carbonates such as the p-nitrophenyl, or succinimidyl; carbonyl imidazole; azlactones; cyclic imide thiones; isocyanates or isothiocyanates; tresyl chloride (EP 714 402, EP 439 508); and aldehydes. Functional groups capable of reacting with carboxylic acid groups, reactive carbonyl groups and oxidized carbohydrate moieties on the polypeptide of the present invention, agonist, antagonist, or antibody include; primary amines; and hydrazine and hydrazide functional groups such as the acyl hydrazides, carbazates, semicarbamates, thiocarbazates, etc. Mercapto groups, if available on the polypeptide of the present invention, agonist, antagonist, or antibody, can also be used as attachment sites for suitably activated polymers with reactive groups such as thiols; maleimides, sulfones, and phenyl glyoxals; see, for example, U.S. Pat. No. 5,093,531, the disclosure of which is hereby incorporated by reference. Other nucleophiles capable of reacting with an electrophilic center include, but are not limited to, for example, hydroxyl, amino, carboxyl, thiol, active methylene and the like.

[0258] In one preferred embodiment of the invention secondary amine or amide linkages are formed using the polypeptide of the present invention, agonist, antagonist, or antibody N-terminal amino groups or ε-amino groups of lysine and the activated PEG. In another preferred aspect of the invention, a secondary amine linkage is formed between the N-terminal primary amino group of polypeptide of the present invention, agonist, antagonist, or antibody and single or branched chain PEG aldehyde by reduction with a suitable reducing agent such as NaCNBH₃, NaBH₃, Pyridine Borane etc. as described in Chamow et al., Bioconjugate Chem. 5: 133-140 (1994) and U.S. Pat. No. 5,824,784.

[0259] In another preferred embodiment of the invention, polymers activated with amide-forming linkers such as succinimidyl esters, cyclic imide thiones, or the like are used to effect the linkage between the polypeptide of the present invention, agonist, antagonist, or antibody and polymer, see for example, U.S. Pat. No. 5,349,001; U.S. Pat. No. 5,405,877; and Greenwald, et al., Crit. Rev. Ther. Drug Carrier Syst. 17:101-161, 2000, which are incorporated herein by reference. One preferred activated poly(ethylene glycol), which may be bound to the free amino groups of polypeptide of the present invention, agonist, antagonist, or antibody includes single or branched chain N-hydroxysuccinylimide poly(ethylene glycol) may be prepared by activating succinic acid esters of poly(ethylene glycol) with N-hydroxysuccinylimide.

[0260] Other preferred embodiments of the invention include using other activated polymers to form covalent linkages of the polymer with the polypeptide of the present invention, agonist, antagonist, or antibody via ε-amino or other groups. For example, isocyanate or isothiocyanate forms of terminally activated polymers can be used to form urea or thiourea-based linkages with the lysine amino groups.

[0261] In another preferred aspect of the invention, carbamate (urethane) linkages are formed with protein amino groups as described in U.S. Pat. Nos. 5,122,614, 5,324,844, and 5,612,640, which are hereby incorporated by reference. Examples include N-succinimidyl carbonate, para-nitrophenyl carbonate, and carbonyl imidazole activated polymers. In another preferred embodiment of this invention, a benzotriazole carbonate derivative of PEG is linked to amino groups on the polypeptide of the present invention, agonist, antagonist, or antibody.

[0262] The protein of the present invention can also be modified in a way to form a chimeric molecule comprising a protein of the present invention fused to another, heterologous polypeptide, or amino acid sequence.

[0263] In one embodiment, such a chimeric molecule comprises a fusion of a protein of the present invention with a tag polypeptide, which provides an epitope to which an anti-tag antibody can selectively bind. The epitope tag is generally placed at the amino- or carboxyl-terminus of the protein. The presence of such epitope-tagged forms of a protein of the present invention can be detected using an antibody against the tag polypeptide. Also, provision of the epitope tag enables the protein to be readily purified by affinity purification using an anti-tag antibody or another type of affinity matrix that binds to the epitope tag. Various tag polypeptides and their respective antibodies are well known in the art. Examples include poly-histidine (poly-His) or poly-histidine-glycine (poly-his-gly) tags; the flu HA tag polypeptide and its antibody 12CA5 (Field et al., Mol. Cell. Biol., 8:2159-2165 (1988)); the c-myc tag and the 8F9, 3C7, 6E10, G4, B7 and 9E10 antibodies thereto (Evan et al., Molecular and Cellular Biology, 5:3610-3616 (1985)); and the Herpes Simplex virus glycoprotein D (gD) tag and its antibody (Paborsky et al., Protein Engineering, 3(6):547-553 (1990)). Other tag polypeptides include the Flag-peptide (Hopp et al., BioTechnology, 6:1204-1210 (1988)); the KT3 epitope peptide (Martin et al., Science, 255:192-194 (1992)); an α-tubulin epitope peptide (Skinner et al., J. Biol. Chem., 266:15163-15166 (1991)); and the T7 gene 10 protein peptide tag (Lutz-Freyermuth et al., Proc. Natl. Acad. Sci. USA, 87:63936397 (1990)).

[0264] In an alternative embodiment, the chimeric molecule can comprise a fusion of the polypeptide with an immunoglobulin or a particular region of an immunoglobulin. For a bivalent form of the chimeric molecule (also referred to as an “immunoadhesin”), such a fusion could be to the Fc region of an IgG molecule. The Ig fusions preferably include the substitution of a soluble (transmembrane domain deleted or inactivated) form of a polypeptide in place of at least one variable region within an Ig molecule. In a particularly preferred embodiment, the immunoglobulin fusion includes the hinge, CH2 and CH3, or the hinge, CH1, CH2 and CH3 regions of an IgG1 molecule. For the production of immunoglobulin fusions see also U.S. Pat. No. 5,428,130 issued Jun. 27, 1995.

[0265] In another embodiment, the chimeric molecule includes a fusion of a protein of the present invention with a signal peptide to allow or enhance secretion of the peptide or even to change its localization within the host cell. The signal sequence is generally placed at the amino- or carboxyl-terminus of a protein of the present invention, more usually the N-terminus when secretion or membrane localization is desired. Such fusions are typically intermediate products, since the signal peptide is usually specifically cleaved by enzymes of the host cell. Provision of a signal peptide enables the protein to be readily purified following its secretion to the culture medium. Various signal polypeptides, which allow secretion or targeting to compartments within the cell, are well known in the art and are available for use with numerous host cells, including yeast and mammalian cells.

[0266] Polynucleotides of the present invention can also be used for gene therapy. Gene therapy refers to therapy that is performed by the administration of a specific nucleic acid to a subject. Delivery of the therapeutic nucleic acid into a mammalian subject may be either direct (i.e., the patient is directly exposed to the nucleic acid or nucleic acid-containing vector) or indirect (i.e., cells are first transformed with the nucleic acid in vitro, then transplanted into the patient). These two approaches are known, respectively, as in vivo or ex vivo gene therapy. Polynucleotides of the invention may also be administered by other known methods for introduction of nucleic acid into a cell or organism (including, without limitation, in the form of viral vectors or naked DNA). Any of the methodologies relating to gene therapy available within the art may be used in the practice of the present invention. See e.g., Gene Therapy of Cancer: Translational Approaches from Preclinical Studies to Clinical Implementation E. C. Lattime & S. L. Gerson, eds Academic Press, 2002.

[0267] Cells may also be cultured ex vivo in the presence of therapeutic agents or proteins of the present invention in order to proliferate or to produce a desired effect on or activity in such cells. Treated cells can then be introduced in vivo for therapeutic purposes.

[0268] Rational Drug Design

[0269] The goal of rational drug design is to produce structural analogs of biologically active polypeptide of interest or of small molecules with which they interact, e.g., agonists, antagonists, or inhibitors. Any of these examples can be used to fashion drugs which are more active or stable forms of the polypeptide or which enhance or interfere with the function of the polypeptide in vivo (cf, Hodgson, Bio/Technology, 9: 19-21 (1991)).

[0270] In one approach, the three-dimensional structure of the polypeptide, or of a polypeptide-inhibitor complex, is determined by x-ray crystallography, by computer modeling or, most typically, by a combination of the two approaches. Both the shape and charges of the polypeptide must be ascertained to elucidate the structure and to determine active site(s) of the molecule. Less often, useful information regarding the structure of the polypeptide can be gained by modeling based on the structure of homologous proteins. In both cases, relevant structural information is used to design analogous polypeptide-like molecules or to identify efficient inhibitors. Useful examples of rational drug design can include molecules which have improved activity or stability as shown by Braxton and Wells, Biochemistry, 31:7796-7801 (1992) or which act as inhibitors, agonists, or antagonists of native peptides as shown by Athauda et al, J. Biochem., 113:742-746 (1993).

[0271] It is also possible to isolate a target-specific antibody, selected by functional assay, as described above, and then to solve its crystal structure. This approach, in principle, yields a pharmacore upon which subsequent drug design can be based. It is possible to bypass protein crystallography altogether by generating anti-idiotypic antibodies (anti-ids) to a functional, pharmacologically active antibody. As a mirror image of a mirror image, the binding site of the anti-ids would be expected to be an analog of the original receptor. The anti-id could then be used to identify and isolate peptides from banks of chemically or biologically produced peptides. The isolated peptides would then act as the pharmacore.

[0272] By virtue of the present invention, sufficient amounts of the polypeptide can be made available to perform such analytical studies as X-ray crystallography. In addition, knowledge of the polypeptide amino acid sequence provided herein will provide guidance to those employing computer modeling techniques in place of or in addition to x-ray crystallography.

[0273] Nucleic Acid

[0274] The present invention further provides isolated nucleic acid molecules that encode a peptide or protein of the present invention. Nucleic acid molecules will consist of, consist essentially of, or comprise a nucleotide sequence that encodes one of the peptides of the present invention, an allelic variant thereof, or an ortholog or paralog thereof.

[0275] As used herein, an “isolated” nucleic acid molecule is one that is separated from other nucleic acid present in the natural source of the nucleic acid. Preferably, an “isolated” nucleic acid is free of sequences which naturally flank the nucleic acid (i.e., sequences located at the 5′ and 3′ ends of the nucleic acid) in the genomic DNA of the organism from which the nucleic acid is derived. The important point is that the nucleic acid is isolated from remote and unimportant flanking sequences such that it can be subjected to the specific manipulations described herein such as recombinant expression, preparation of probes and primers, and other uses specific to the nucleic acid sequences.

[0276] Moreover, an “isolated” nucleic acid molecule, such as a transcript/cDNA molecule, can be substantially free of other cellular material, or culture medium when produced by recombinant techniques, or chemical precursors or other chemicals when chemically synthesized. However, the nucleic acid molecule can be fused to other coding or regulatory sequences and still be considered isolated.

[0277] For example, recombinant DNA molecules contained in a vector are considered isolated. Further examples of isolated DNA molecules include recombinant DNA molecules maintained in heterologous host cells or purified (partially or substantially) DNA molecules in solution. Isolated RNA molecules include in vivo or in vitro RNA transcripts of the isolated DNA molecules of the present invention. Isolated nucleic acid molecules according to the present invention further include such molecules produced synthetically.

[0278] Accordingly, the present invention provides nucleic acid molecules that comprises the nucleotide sequence shown in SEQ ID NOs:1-38, or any nucleic acid molecule that encodes the protein provided in SEQ ID NOs:39-76. A nucleic acid molecule comprisise a nucleotide sequence when the nucleotide sequence includes the nucleotide sequence of the nucleic acid molecule

[0279] Accordingly, the present invention provides nucleic acid molecules that comprise the nucleotide sequence shown in SEQ ID NOs:1-11, SEQ ID NOs:13-38, and SEQ ID NO:3113, or any nucleic acid molecule that encodes the protein provided in SEQ ID NOs:39-49, SEQ ID NOs:51-76, and SEQ ID NO:3114. A nucleic acid molecule consists of a nucleotide sequence when the nucleotide sequence is the complete nucleotide sequence of the nucleic acid molecule.

[0280] Accordingly, the present invention provides nucleic acid molecules that consist of the nucleotide sequence shown in SEQ ID NOs:1-11, SEQ ID NOs:13-38, and SEQ ID NO:3113, or any nucleic acid molecule that encodes the protein provided in SEQ ID NOs:39-49, SEQ ID NOs:51-76, and SEQ ID NO:3114. A nucleic acid molecule consists of a nucleotide sequence when the nucleotide sequence is the complete nucleotide sequence of the nucleic acid molecule.

[0281] The present invention further provides nucleic acid molecules that consist essentially of the nucleotide sequence shown in SEQ ID NOs:1-11, SEQ ID NOs:13-38, and SEQ ID NO:3113, or any nucleic acid molecule that encodes the protein provided in SEQ ID NOs:39-49, SEQ ID NOs:51-76, and SEQ ID NO:3114. A nucleic acid molecule consists essentially of a nucleotide sequence when such a nucleotide sequence is present with only a few additional nucleic acid residues in the final nucleic acid molecule.

[0282] The isolated nucleic acid molecules can encode the mature protein plus additional amino or carboxyl-terminal amino acids, or amino acids interior to the mature peptide (when the mature form has more than one peptide chain, for instance). Such sequences may play a role in processing of a protein from precursor to a mature form, facilitate protein trafficking, prolong or shorten protein half-life or facilitate manipulation of a protein for assay or production, among other things. As generally is the case in situ, the additional amino acids may be processed away from the mature protein by cellular enzymes.

[0283] As mentioned above, the isolated nucleic acid molecules include, but are not limited to, the sequence encoding the peptide alone, the sequence encoding the mature peptide and additional coding sequences, such as a leader or secretory sequence (e.g., a pre-pro or pro-protein sequence), the sequence encoding the mature peptide, with or without the additional coding sequences, plus additional non-coding sequences, for example introns and non-coding 5′ and 3′ sequences such as transcribed but non-translated sequences that play a role in transcription, mRNA processing (including splicing and polyadenylation signals), ribosome binding and stability of mRNA. In addition, the nucleic acid molecule may be fused to a marker sequence encoding, for example, a peptide that facilitates purification.

[0284] Isolated nucleic acid molecules can be in the form of RNA, such as mRNA, or in the form DNA, including cDNA and genomic DNA obtained by cloning or produced by chemical synthetic techniques or by a combination thereof. The nucleic acid, especially DNA, can be double-stranded or single-stranded. Single-stranded nucleic acid can be the coding strand (sense strand) or the non-coding strand (anti-sense strand).

[0285] The invention further provides nucleic acid molecules that encode fragments of the peptides of the present invention as well as nucleic acid molecules that encode obvious variants of the proteins of the present invention that are described above. Such nucleic acid molecules may be naturally occurring, such as allelic variants (same locus), paralogs (different locus), and orthologs (different organism), or may be constructed by recombinant DNA methods or by chemical synthesis. Such non-naturally occurring variants may be made by mutagenesis techniques, including those applied to nucleic acid molecules, cells, or organisms. Accordingly, as discussed above, the variants can contain nucleotide substitutions, deletions, inversions and insertions. Variation can occur in either or both the coding and non-coding regions. The variations can produce both conservative and non-conservative amino acid substitutions.

[0286] A fragment comprises a contiguous nucleotide sequence greater than 12 or more nucleotides. Further, a fragment could be at least 30, 40, 50, 100, 250 or 500 nucleotides in length depending on the length of the original nucleotide sequence. The length of the fragment will be based on its intended use. For example, the fragment can encode epitope bearing regions of the peptide, or can be useful as DNA probes and primers. Such fragments can be isolated using the known nucleotide sequence to synthesize an oligonucleotide probe. A labeled probe can then be used to screen a cDNA library, genomic DNA library, or mRNA to isolate nucleic acid corresponding to the coding region. Further, primers can be used in PCR reactions to clone specific regions of gene.

[0287] A probe/primer typically comprises substantially a purified oligonucleotide or oligonucleotide pair. The oligonucleotide typically comprises a region of nucleotide sequence that hybridizes under stringent conditions to at least about 12, 20, 25, 40, 50 or more consecutive nucleotides.

[0288] Orthologs, homologs, and allelic variants can be identified using methods well known in the art. These variants comprise a nucleotide sequence encoding a peptide that is typically 60-70%, 70-80%, 80-90%, and more typically at least about 90-95% or more homologous to the nucleotide sequence. Such nucleic acid molecules can readily be identified as being able to hybridize under moderate to stringent conditions. Allelic variants can readily be determined by genetic locus of the encoding gene

[0289] As used herein, the term “hybridizes under stringent conditions” is intended to describe conditions for hybridization and washing under which nucleotide sequences encoding a peptide at least 60-70% homologous to each other typically remain hybridized to each other. The conditions can be such that sequences at least about 60%, at least about 70%, at least about 80%, at least about 90%, at least about 95%, at least about 98%, or at least about 99% or more homologous to each other typically remain hybridized to each other. Such stringent conditions are known to those skilled in the art and can be found in Current Protocols in Molecular Biology, John Wiley & Sons, N.Y. (1989), 6.3.1-6.3.6. One example of stringent hybridization conditions are hybridization in 6×SSC (sodium chloride/sodium citrate) at about 45° C., followed by one or more washes in 0.2×SSC, 0.1% SDS at 50-65° C. Examples of moderate to low stringency hybridization conditions are well known in the art.

[0290] Nucleic Acid Molecule Uses

[0291] The nucleic acid molecules of the present invention are useful for probes, primers, chemical intermediates, and in biological assays. The nucleic acid molecules are useful as a hybridization probe for messenger RNA, transcript/cDNA and genomic DNA to isolate full-length cDNA and genomic clones encoding the peptides shown in SEQ ID NOs:39-49, SEQ ID NOs:51-76, and SEQ ID NO:3114 and to isolate cDNA and genomic clones that correspond to variants (alleles, orthologs, etc.) producing the same or related peptides shown in SEQ ID NOs:39-49, SEQ ID NOs:51-76, and SEQ ID NO:3114.

[0292] The probe can correspond to any sequence along the entire length of the nucleic acid molecules. Accordingly, it could be derived from 5′ noncoding regions, the coding region, and 3′ noncoding regions.

[0293] The nucleic acid molecules are also useful as primers for PCR to amplify any given region of a nucleic acid molecule and are useful to synthesize antisense molecules of desired length and sequence.

[0294] The nucleic acid molecules are also useful for constructing recombinant vectors. Such vectors include expression vectors that express a portion of, or all of, the peptide sequences. Vectors also include insertion vectors, used to integrate into another nucleic acid molecule sequence, such as into the cellular genome, to alter in situ expression of a gene and/or gene product. For example, an endogenous coding sequence can be replaced via homologous recombination with all or part of the coding region containing one or more specifically introduced mutations.

[0295] The nucleic acid molecules are also useful for expressing antigenic portions of the proteins.

[0296] The nucleic acid molecules are also useful as probes for determining the chromosomal positions of the nucleic acid molecules by means of in situ hybridization methods.

[0297] The nucleic acid molecules are also useful in making vectors containing the gene regulatory regions of the nucleic acid molecules of the present invention.

[0298] The nucleic acid molecules are also useful for designing ribozymes corresponding to all, or a part, of the mRNA produced from the nucleic acid molecules described herein.

[0299] The nucleic acid molecules are also useful for making vectors that express part, or all, of the peptides.

[0300] The nucleic acid molecules are also useful for constructing host cells expressing a part, or all, of the nucleic acid molecules and peptides.

[0301] The nucleic acid molecules are also useful for constructing transgenic animals expressing all, or a part, of the nucleic acid molecules and peptides.

[0302] The nucleic acid molecules are also useful as hybridization probes for determining the presence, level, form and distribution of nucleic acid expression. Accordingly, the probes can be used to detect the presence of, or to determine levels of, a specific nucleic acid molecule in cells, tissues, and in organisms. The nucleic acid whose level is determined can be DNA or RNA. Accordingly, probes corresponding to the peptides described herein can be used to assess expression and/or gene copy number in a given cell, tissue, or organism. These uses are relevant for diagnosis of disorders involving an increase or decrease in protein expression relative to normal results.

[0303] Probes can be used as a part of a diagnostic test kit for identifying cells or tissues that express a protein.

[0304] Nucleic Acid Expression Assays

[0305] Nucleic acid expression assays are useful for drug screening to identify compounds that modulate nucleic acid expression.

[0306] The compounds can be used to treat a disorder associated with nucleic acid expression of the gene, particularly biological and pathological processes that are mediated by the gene in cells and tissues that express it. The method typically includes assaying the ability of the compound to modulate the expression of the nucleic acid and thus identifying a compound that can be used to treat a disorder characterized by undesired nucleic acid expression. The assays can be performed in cell-based and cell-free systems. Cell-based assays include cells naturally expressing the nucleic acid or recombinant cells genetically engineered to express specific nucleic acid sequences.

[0307] The assay for nucleic acid expression can involve direct assay of nucleic acid levels, such as mRNA levels. In this embodiment the regulatory regions of these genes can be operably linked to a reporter gene such as luciferase.

[0308] Thus, modulators of gene expression can be identified in a method wherein a cell is contacted with a candidate compound and the expression of mRNA determined. The level of expression of mRNA in the presence of the candidate compound is compared to the level of expression of mRNA in the absence of the candidate compound. The candidate compound can then be identified as a modulator of nucleic acid expression based on this comparison and be used, for example to treat a disorder characterized by aberrant nucleic acid expression. When expression of mRNA is statistically significantly greater in the presence of the candidate compound than in its absence, the candidate compound is identified as a stimulator of nucleic acid expression. When nucleic acid expression is statistically significantly less in the presence of the candidate compound than in its absence, the candidate compound is identified as an inhibitor of nucleic acid expression.

[0309] The invention further provides methods of treatment, with the nucleic acid as a target, using a compound identified through drug screening as a gene modulator to modulate nucleic acid expression in cells and tissues that express the nucleic acid. Modulation includes both up-regulation (i.e. activation or agonization) or down-regulation (suppression or antagonization) or nucleic acid expression.

[0310] Alternatively, a modulator for nucleic acid expression can be a small molecule or drug identified using the screening assays described herein as long as the drug or small molecule inhibits the nucleic acid expression in the cells and tissues that express the protein.

[0311] The nucleic acid molecules are also useful for monitoring the effectiveness of modulating compounds on the expression or activity of the gene in clinical trials or in a treatment regimen. Thus, the gene expression pattern can serve as a barometer for the continuing effectiveness of treatment with the compound, particularly with compounds to which a patient can develop resistance. The gene expression pattern can also serve as a marker indicative of a physiological response of the affected cells to the compound. Accordingly, such monitoring would allow either increased administration of the compound or the administration of alternative compounds to which the patient has not become resistant. Similarly, if the level of nucleic acid expression falls below a desirable level, administration of the compound could be commensurately decreased.

[0312] Nucleic Acid Diagnostics

[0313] The nucleic acid molecules are also useful in diagnostic assays for qualitative changes in nucleic acid expression, and particularly in qualitative changes that lead to pathology. The nucleic acid molecules can be used to detect mutations in genes and gene expression products such as mRNA. The nucleic acid molecules can be used as hybridization probes to detect naturally occurring genetic mutations in the gene and thereby to determine whether a subject with the mutation is at risk for a disorder caused by the mutation. Mutations include deletion, addition, or substitution of one or more nucleotides in the gene, chromosomal rearrangement, such as inversion or transposition, modification of genomic DNA, such as aberrant methylation patterns or changes in gene copy number, such as amplification. Detection of a mutated form of the gene associated with a dysfunction provides a diagnostic tool for an active disease or susceptibility to disease when the disease results from overexpression, underexpression, or altered expression of a protein.

[0314] Individuals carrying mutations in the gene can be detected at the nucleic acid level by a variety of techniques. Genomic DNA can be analyzed directly or can be amplified by using PCR prior to analysis. RNA or cDNA can be used in the same way. In some uses, detection of the mutation involves the use of a probe/primer in a polymerase chain reaction (PCR) (see, e.g. U.S. Pat. Nos. 4,683,195 and 4,683,202), such as anchor PCR or RACE PCR, or, alternatively, in a ligation chain reaction (LCR) (see, e.g., Landegran et al., Science 241:1077-1080 (1988); and Nakazawa et al., PNAS 91:360-364 (1994)), the latter of which can be particularly useful for detecting point mutations in the gene (see Abravaya et al., Nucleic Acids Res. 23:675-682 (1995)). This method can include the steps of collecting a sample of cells from a patient, isolating nucleic acid (e.g., genomic, mRNA or both) from the cells of the sample, contacting the nucleic acid sample with one or more primers which specifically hybridize to a gene under conditions such that hybridization and amplification of the gene (if present) occurs, and detecting the presence or absence of an amplification product, or detecting the size of the amplification product and comparing the length to a control sample. Deletions and insertions can be detected by a change in size of the amplified product compared to the normal genotype. Point mutations can be identified by hybridizing amplified DNA to normal RNA or antisense DNA sequences.

[0315] Alternatively, mutations in a gene can be directly identified, for example, by alterations in restriction enzyme digestion patterns determined by gel electrophoresis.

[0316] Further, sequence-specific ribozymes (U.S. Pat. No. 5,498,531) can be used to score for the presence of specific mutations by development or loss of a ribozyme cleavage site. Perfectly matched sequences can be distinguished from mismatched sequences by nuclease cleavage digestion assays or by differences in melting temperature.

[0317] Sequence changes at specific locations can also be assessed by nuclease protection assays such as RNase and SI protection or the chemical cleavage method. Furthermore, sequence differences between a mutant gene and a wild-type gene can be determined by direct DNA sequencing. A variety of automated sequencing procedures can be utilized when performing the diagnostic assays (Naeve, C. W., (1995) Biotechniques 19:448), including sequencing by mass spectrometry (see, e.g., PCT International Publication No. WO 94/16101; Cohen et al., Adv. Chromatogr. 36:127-162 (1996); and Griffin et al., Appl. Biochem. Biotechnol. 38:147-159 (1993)).

[0318] Other methods for detecting mutations in the gene include methods in which protection from cleavage agents is used to detect mismatched bases in RNA/RNA or RNA/DNA duplexes (Myers et al., Science 230:1242 (1985)); Cotton et al., PNAS 85:4397 (1988); Saleeba et al., Meth. Enzymol. 217:286-295 (1992)), electrophoretic mobility of mutant and wild type nucleic acid is compared (Orita et al., PNAS 86:2766 (1989); Cotton et al., Mutat. Res. 285:125-144 (1993); and Hayashi et al., Genet. Anal. Tech. Appl. 9:73-79 (1992)), and movement of mutant or wild-type fragments in polyacrylamide gels containing a gradient of denaturant is assayed using denaturing gradient gel electrophoresis (Myers et al., Nature 313:495 (1985)). Examples of other techniques for detecting point mutations include selective oligonucleotide hybridization, selective amplification, and selective primer extension.

[0319] Gene amplification and/or expression can be measured in a sample directly. Alternatively, antibodies can be employed that can recognize specific duplexes, including DNA duplexes, RNA duplexes, and DNA-RNA hybrid duplexes or DNA-protein duplexes. The antibodies in turn can be labeled and the assay can be carried out where the duplex is bound to a surface, so that upon the formation of duplex on the surface, the presence of antibody bound to the duplex can be detected.

[0320] Gene expression, alternatively, can be measured by immunological methods, such as immunohistochemical staining of cells or tissue sections and assay of cell culture or body fluids, to quantitate directly the expression of gene product. Antibodies useful for immunohistochemical staining and/or assay of sample fluids can be either monoclonal or polyclonal, and can be prepared in any mammal. Conveniently, the antibodies can be prepared against a native sequence polypeptide or against a synthetic peptide based on the DNA sequences provided herein or against exogenous sequence fused to DNA and encoding a specific antibody epitope.

[0321] The nucleic acid molecules are also useful for testing an individual for a genotype that while not necessarily causing the disease, nevertheless affects the treatment modality. Thus, the nucleic acid molecules can be used to study the relationship between an individual's genotype and the individual's response to a compound used for treatment (pharmacogenomic relationship). Accordingly, the nucleic acid molecules described herein can be used to assess the mutation content of the gene in an individual in order to select an appropriate compound or dosage regimen for treatment.

[0322] Thus nucleic acid molecules displaying genetic variations that affect treatment provide a diagnostic target that can be used to tailor treatment in an individual. Accordingly, the production of recombinant cells and animals containing these polymorphisms allow effective clinical design of treatment compounds and dosage regimens.

[0323] The present invention is directed to antisense compounds, particularly oligonucleotides, which are targeted to a nucleic acid encoding polypeptide of the present invention, and which modulate the expression of the polypeptide of the present invention. Pharmaceutical and other compositions comprising the antisense compounds of the invention are also provided. Further provided are methods of modulating the expression of the polypeptide of the present invention in cells or tissues comprising contacting said cells or tissues with one or more of the antisense compounds or compositions of the invention. Further provided are methods of treating an animal, particularly a human, suspected of having or being prone to a disease or condition associated with expression of the polypeptide of the present invention by administering a therapeutically or prophylactically effective amount of one or more of the antisense compounds or compositions of the invention.

[0324] The nucleic acid molecules are thus useful as antisense constructs to control gene expression in cells, tissues, and organisms. A DNA antisense nucleic acid molecule is designed to be complementary to a region of the gene involved in transcription, preventing transcription and hence production of protein. An antisense RNA or DNA nucleic acid molecule would hybridize to the mRNA and thus block translation of mRNA into protein, if targeted to the initiator AUG codon. Alternatively, a DNA antisense molecule can modulate gene expression by stimulating RNAseH-dependent degradation of the target mRNA. Antisense oligonucleotides are anticipated to also contain modified nucleic acids that impart improved properties such as phosphorothioate, polyamide or morpholino groups.

[0325] Alternatively, a class of antisense molecules can be used to inactivate mRNA in order to decrease expression of nucleic acid. Accordingly, these molecules can treat a disorder characterized by abnormal or undesired nucleic acid expression. This technique involves cleavage by means of ribozymes containing nucleotide sequences complementary to one or more regions in the mRNA that attenuate the ability of the mRNA to be translated. Possible regions include coding regions and particularly coding regions corresponding to the catalytic and other functional activities of the protein, such as substrate binding.

[0326] In addition, nucleic acids can be used to generate small interfering RNAs (siRNA) which, when delivered to a cell expressing the target mRNA, can lead to a decrease in the level of that RNA and thus a decrease in protein expressed by that RNA (Elbashir et al., Genes and Development. 15: 188-200, 2001). Generation of siRNAs can be accomplished using commercially available kits (MEGAscript RNAi Kit, Ambion, Inc. Austin, Tex.)

[0327] The nucleic acid molecules also provide vectors for gene therapy in patients containing cells that are aberrant in gene expression. Thus, recombinant cells, which include the patient's cells that have been engineered ex vivo and returned to the patient, are introduced into an individual where the cells produce the desired protein to treat the individual.

[0328] The invention also encompasses kits for detecting the presence of a nucleic acid in a biological sample. For example, the kit can comprise reagents such as a labeled or labelable nucleic acid or agent capable of detecting nucleic acid in a biological sample; means for determining the amount of nucleic acid in the sample; and means for comparing the amount of nucleic acid in the sample with a standard.

[0329] The compound or agent can be packaged in a suitable container. The kit can further comprise instructions for using the kit to detect protein mRNA or DNA.

[0330] Vectors/Host Cells

[0331] The invention also provides vectors containing the nucleic acid molecules described herein. The term “vector” refers to a vehicle, preferably a nucleic acid molecule, which can transport the nucleic acid molecules. When the vector is a nucleic acid molecule, the nucleic acid molecules are covalently linked to the vector nucleic acid. With this aspect of the invention, the vector includes a plasmid, single or double stranded phage, a single or double stranded RNA or DNA viral vector, or artificial chromosome, such as a BAC, PAC, YAC, OR MAC.

[0332] A vector can be maintained in the host cell as an extrachromosomal element where it replicates and produces additional copies of the nucleic acid molecules. Alternatively, the vector may integrate into the host cell genome and produce additional copies of the nucleic acid molecules when the host cell replicates.

[0333] The invention provides vectors for the maintenance (cloning vectors) or vectors for expression (expression vectors) of the nucleic acid molecules. The vectors can function in prokaryotic or eukaryotic cells or in both (shuttle vectors).

[0334] Expression vectors contain cis-acting regulatory regions that are operably linked in the vector to the nucleic acid molecules such that transcription of the nucleic acid molecules is allowed in a host cell. The nucleic acid molecules can be introduced into the host cell with a separate nucleic acid molecule capable of affecting transcription. Thus, the second nucleic acid molecule may provide a transacting factor interacting with the cis-regulatory control region to allow transcription of the nucleic acid molecules from the vector. Alternatively, a trans-acting factor may be supplied by the host cell. Finally, a trans-acting factor can be produced from the vector itself. It is understood, however, that in some embodiments, transcription and/or translation of the nucleic acid molecules can occur in a cell-free system.

[0335] The regulatory sequences to which the nucleic acid molecules described herein can be operably linked include promoters for directing mRNA transcription. These include, but are not limited to, the left promoter from bacteriophage λ, the lac, TRP, and TAC promoters from E. coli, the early and late promoters from SV40, the CMV immediate early promoter, the adenovirus early and late promoters, and retrovirus long-terminal repeats.

[0336] In addition to control regions that promote transcription, expression vectors may also include regions that modulate transcription, such as repressor binding sites and enhancers. Examples include the SV40 enhancer, the cytomegalovirus immediate early enhancer, polyoma enhancer, adenovirus enhancers, and retrovirus LTR enhancers.

[0337] In addition to containing sites for transcription initiation and control, expression vectors can also contain sequences necessary for transcription termination and, in the transcribed region a ribosome binding site for translation. Other regulatory control elements for expression include initiation and termination codons as well as polyadenylation signals. The person of ordinary skill in the art would be aware of the numerous regulatory sequences that are useful in expression vectors. Such regulatory sequences are described, for example, in Sambrook et al., Molecular Cloning: A Laboratory Manual. 3rd. ed., Cold Spring Harbor Laboratory Press, Cold Spring Harbor, N.Y., (2001)

[0338] A variety of expression vectors can be used to express a nucleic acid molecule. Such vectors include chromosomal, episomal, and virus-derived vectors, for example vectors derived from bacterial plasmids, from bacteriophage, from yeast episomes, from yeast chromosomal elements, including yeast artificial chromosomes, from viruses such as baculoviruses, papovaviruses such as SV40, Vaccinia viruses, adenoviruses, poxviruses, pseudorabies viruses, and retroviruses. Vectors may also be derived from combinations of these sources such as those derived from plasmid and bacteriophage genetic elements, e.g. cosmids and phagemids. Appropriate cloning and expression vectors for prokaryotic and eukaryotic hosts are described in Sambrook et al., Molecular Cloning: A Laboratory Manual. 3rd. ed., Cold Spring Harbor Laboratory Press, Cold Spring Harbor, N.Y., (2001).

[0339] The regulatory sequence may provide constitutive expression in one or more host cells (i.e. tissue specific) or may provide for inducible expression in one or more cell types such as by temperature, nutrient additive, or exogenous factor such as a hormone or other ligand. A variety of vectors providing for constitutive and inducible expression in prokaryotic and eukaryotic hosts are well known to those of ordinary skill in the art.

[0340] The nucleic acid molecules can be inserted into the vector nucleic acid by well-known methodology. Generally, the DNA sequence that will ultimately be expressed is joined to an expression vector by cleaving the DNA sequence and the expression vector with one or more restriction enzymes and then ligating the fragments together. Procedures for restriction enzyme digestion and ligation are well known to those of ordinary skill in the art.

[0341] The vector containing the appropriate nucleic acid molecule can be introduced into an appropriate host cell for propagation or expression using well-known techniques. Bacterial cells include, but are not limited to, E. coli, Streptomyces, and Salmonella typhimurium. Eukaryotic cells include, but are not limited to, yeast, insect cells such as Drosophila, animal cells such as COS and CHO cells, and plant cells.

[0342] As described herein, it may be desirable to express the peptide as a fusion protein. Accordingly, the invention provides fusion vectors that allow for the production of the peptides. Fusion vectors can increase the expression of a recombinant protein, increase the solubility of the recombinant protein, and aid in the purification of the protein by acting for example as a ligand for affinity purification. A proteolytic cleavage site may be introduced at the junction of the fusion moiety so that the desired peptide can ultimately be separated from the fission moiety. Proteolytic enzymes include, but are not limited to, factor Xa, thrombin, and enterolipase. Typical fusion expression vectors include pGEX (Smith et al., Gene 67:31-40 (1988)), pMAL (New England Biolabs, Beverly, Mass.) and pRIT5 (Pharmacia, Piscataway, N.J.) which fuse glutathione S-transferase (GST), maltose E binding protein, or protein A, respectively, to the target recombinant protein. Examples of suitable inducible non-fusion E. coli expression vectors include pTrc (Amann et al., Gene 69:301-315 (1988)) and pET11d (Studier et al., Gene Expression Technology: Methods in Enzymology 185:60-89 (1990)).

[0343] Recombinant protein expression can be maximized in host bacteria by providing a genetic background wherein the host cell has an impaired capacity to proteolytically cleave the recombinant protein. (Gottesman, S., Gene Expression Technology: Methods in Enzymology 185, Academic Press, San Diego, Calif. (1990)119-128). Alternatively, the sequence of the nucleic acid molecule of interest can be altered to provide preferential codon usage for a specific host cell, for example E. coli. (Wada et al., Nucleic Acids Res. 20:2111-2118 (1992)).

[0344] The nucleic acid molecules can also be expressed by expression vectors that are operative in yeast. Examples of vectors for expression in yeast e.g., S. cerevisiae include pYepSec1 (Baldari, et al., EMBO J. 6:229-234 (1987)), pMFa (Kurjan et al., Cell 30:933-943(1982)), pJRY88 (Schultz et al., Gene 54:113-123 (1987)), and pYES2 (Invitrogen Corporation, San Diego, Calif.).

[0345] The nucleic acid molecules can also be expressed in insect cells using, for example, baculovirus expression vectors. Baculovirus vectors available for expression of proteins in cultured insect cells (e.g., Sf 9 cells) include the pAc series (Smith et al., Mol. Cell Biol. 3:2156-2165 (1983)) and the pVL series (Lucklow et al., Virology 170:31-39 (1989)).

[0346] In certain embodiments of the invention, the nucleic acid molecules described herein are expressed in mammalian cells using mammalian expression vectors. Examples of mammalian expression vectors include pCDM8 (Seed, B. Nature 329:840(1987)) and pMT2PC (Kaufman et al., EMBO J. 6:187-195 (1987)).

[0347] The expression vectors listed herein are provided by way of example only of the well-known vectors available to those of ordinary skill in the art that would be useful to express the nucleic acid molecules. The person of ordinary skill in the art would be aware of other vectors suitable for maintenance propagation or expression of the nucleic acid molecules described herein. These are found for example in Sambrook, J., Fritsh, E. F., and Maniatis, T. Molecular Cloning: A Laboratory Manual. 3rd, ed., Cold Spring Harbor Laboratory, Cold Spring Harbor Laboratory Press, Cold Spring Harbor, N.Y., 2001.

[0348] The invention also encompasses vectors in which the nucleic acid sequences described herein are cloned into the vector in reverse orientation, but operably linked to a regulatory sequence that permits transcription of antisense RNA. Thus, an antisense transcript can be produced to all, or to a portion, of the nucleic acid molecule sequences described herein, including both coding and non-coding regions. Expression of this antisense RNA is subject to each of the parameters described above in relation to expression of the sense RNA (regulatory sequences, constitutive or inducible expression, tissue-specific expression).

[0349] The invention also relates to recombinant host cells containing the vectors described herein. Host cells therefore include prokaryotic cells, lower eukaryotic cells such as yeast, other eukaryotic cells such as insect cells, and higher eukaryotic cells such as mammalian cells.

[0350] The recombinant host cells are prepared by introducing the vector constructs described herein into the cells by techniques readily available to the person of ordinary skill in the art. These include, but are not limited to, calcium phosphate transfection, DEAE-dextran-mediated transfection, cationic lipid-mediated transfection, electroporation, transduction, infection, lipofection, and other techniques such as those found in Sambrook, et al. (Molecular Cloning: A Laboratory Manual. 3rd, ed., Cold Spring Harbor Laboratory, Cold Spring Harbor Laboratory Press, Cold Spring Harbor, N.Y., 2001).

[0351] Host cells can contain more than one vector. Thus, different nucleotide sequences can be introduced on different vectors of the same cell. Similarly, the nucleic acid molecules can be introduced either alone or with other nucleic acid molecules that are not related to the nucleic acid molecules such as those providing trans-acting factors for expression vectors. When more than one vector is introduced into a cell, the vectors can be introduced independently, co-introduced or joined to the nucleic acid molecule vector.

[0352] In the case of bacteriophage and viral vectors, these can be introduced into cells as packaged or encapsulated virus by standard procedures for infection and transduction. Viral vectors can be replication-competent or replication-defective. In the case in which viral replication is defective, replication will occur in host cells providing functions that complement the defects.

[0353] Vectors generally include selectable markers that enable the selection of the subpopulation of cells that contain the recombinant vector constructs. The marker can be contained in the same vector that contains the nucleic acid molecules described herein or may be on a separate vector. Markers include tetracycline or ampicillin-resistance genes for prokaryotic host cells and dihydrofolate reductase or neomycin resistance for eukaryotic host cells. However, any marker that provides selection for a phenotypic trait will be effective.

[0354] While the mature proteins can be produced in bacteria, yeast, mammalian cells, and other cells under the control of the appropriate regulatory sequences, cell-free transcription and translation systems can also be used to produce these proteins using RNA derived from the DNA constructs described herein.

[0355] Where secretion of the peptide is desired, which is difficult to achieve with multi-transmembrane domain containing proteins, appropriate secretion signals are incorporated into the vector. The signal sequence can be endogenous to the peptides or heterologous to these peptides.

[0356] Where the peptide is not secreted into the medium the protein can be isolated from the host cell by standard disruption procedures, including freeze thaw, sonication, mechanical disruption, use of lysing agents and the like. The peptide can then be recovered and purified by well-known purification methods including ammonium sulfate precipitation, acid extraction, anion or cationic exchange chromatography, phosphocellulose chromatography, hydrophobic-interaction chromatography, affinity chromatography, hydroxylapatite chromatography, lectin chromatography, or high performance liquid chromatography.

[0357] It is also understood that depending upon the host cell in recombinant production of the peptides described herein, the peptides can have various glycosylation patterns, depending upon the cell, or maybe non-glycosylated as when produced in bacteria. In addition, the peptides may include an initial modified methionine in some cases as a result of a host-mediated process.

[0358] Uses of Vectors and Host Cells

[0359] The recombinant host cells expressing the proteins described herein have a variety of uses. First, the cells are useful for producing protein that can be further purified to produce desired amounts of protein. Thus, host cells containing expression vectors are useful for protein production.

[0360] Host cells are also useful for conducting cell-based assays involving the protein or protein fragments, such as those described above as well as other formats known in the art. Thus, a recombinant host cell expressing a native protein is useful for assaying compounds that stimulate or inhibit protein function.

[0361] Host cells are also useful for identifying protein mutants in which these functions are affected. If the mutants naturally occur and give rise to a pathology, host cells containing the mutations are useful to assay compounds that have a desired effect on the mutant protein (for example, stimulating or inhibiting function) which may not be indicated by their effect on the native protein.

[0362] Transgenic Animals

[0363] Genetically engineered host cells can be further used to produce non-human transgenic animals. A transgenic animal is preferably a mammal, for example a rodent, such as a rat or mouse, in which one or more of the cells of the animal include a transgene. A transgene is exogenous DNA which is integrated into the genome of a cell from which a transgenic animal develops and which remains in the genome of the mature animal in one or more cell types or tissues of the transgenic animal. These animals are useful for studying the function of a protein and identifying and evaluating modulators of protein activity. Other examples of transgenic animals include non-human primates, sheep, dogs, cows, goats, chickens, and amphibians.

[0364] A transgenic animal can be produced by introducing nucleic acid into the male pronuclei of a fertilized oocyte, e.g., by microinjection, retroviral infection, and allowing the oocyte to develop in a pseudopregnant female foster animal. Any of the protein nucleotide sequences can be introduced as a transgene into the genome of a non-human animal, such as a mouse.

[0365] Any of the regulatory or other sequences useful in expression vectors can form part of the transgenic sequence. This includes intronic sequences and polyadenylation signals, if not already included. A tissue-specific regulatory sequence(s) can be operably linked to the transgene to direct expression of the protein to particular cells.

[0366] Methods for generating transgenic animals via embryo manipulation and microinjection, particularly animals such as mice, have become conventional in the art and are described, for example, in U.S. Pat. Nos. 4,736,866 and 4,870,009, both by Leder et al., U.S. Pat. No. 4,873,191 by Wagner et al. and in Hogan, B., Manipulating the Mouse Embryo, (Cold Spring Harbor Laboratory Press, Cold Spring Harbor, N.Y., 1986). Similar methods are used for production of other transgenic animals. A transgenic founder animal can be identified based upon the presence of the transgene in its genome and/or expression of transgenic mRNA in tissues or cells of the animals. A transgenic founder animal can then be used to breed additional animals carrying the transgene. Moreover, transgenic animals carrying a transgene can further be bred to other transgenic animals carrying other transgenes. A transgenic animal also includes animals in which the entire animal or tissues in the animal have been produced using the homologously recombinant host cells described herein.

[0367] In another embodiment, transgenic non-human animals can be produced which contain selected systems that allow for regulated expression of the transgene. One example of such a system is the cre/loxP recombinase system of bacteriophage P1. For a description of the cre/loxP recombinase system, see, e.g., Lakso et al. PNAS 89:6232-6236 (1992). Another example of a recombinase system is the FLP recombinase system of S. cerevisiae (O'Gorman et al. Science 251:1351-1355 (1991). If a cre/loxP recombinase system is used to regulate expression of the transgene, animals containing transgenes encoding both the Cre recombinase and a selected protein is required. Such animals can be provided through the construction of “double” transgenic animals, e.g., by mating two transgenic animals, one containing a transgene encoding a selected protein and the other containing a transgene encoding a recombinase.

[0368] Clones of the non-human transgenic animals described herein can also be produced according to the methods described in Wilmut, I. et al. Nature 385:810-813 (1997) and PCT International Publication Nos. WO 97/07668 and WO 97/07669. In brief, a cell, e.g., a somatic cell, from the transgenic animal can be isolated and induced to exit the growth cycle and enter G₀ phase. The quiescent cell can then be fused, e.g., through the use of electrical pulses, to an enucleated oocyte from an animal of the same species from which the quiescent cell is isolated. The reconstructed oocyte is then cultured such that it develops to morula or blastocyst and then transferred to pseudopregnant female foster animal. The offspring born of this female foster animal will be a clone of the animal from which the cell, e.g., the somatic cell, is isolated.

[0369] Transgenic animals containing recombinant cells that express the peptides described herein are useful to conduct the assays described herein in an in vivo context. Accordingly, the various physiological factors that are present in vivo and that could effect substrate binding, and protein activation, may not be evident from in vitro cell-free or cell-based assays. Accordingly, it is useful to provide non-human transgenic animals to assay in vivo protein function, including substrate interaction, the effect of specific mutant proteins on protein function and substrate interaction, and the effect of chimeric proteins. It is also possible to assess the effect of null mutations, that is mutations that substantially or completely eliminate one or more protein functions.

[0370] All publications and patents mentioned in the above specification are herein incorporated by reference. Various modifications and variations of the described method and system of the invention will be apparent to those skilled in the art without departing from the scope and spirit of the invention. Although the invention has been described in connection with specific preferred embodiments, it should be understood that the invention as claimed should not be unduly limited to such specific embodiments. Indeed, various modifications of the above-described modes for carrying out the invention which are obvious to those skilled in the field of molecular biology or related fields are intended to be within the scope of the following claims.

[0371] Microarrays Construction and Element Selection

[0372] A chemical coupling procedure and an ink jet device can be used to synthesize array elements on the surface of a substrate. (See, e.g., Gamble et al. U.S. Pat. No. 5,981,733) An array analogous to a dot or slot blot may also be used to arrange and link elements to the surface of a substrate using or thermal, UV, mechanical, or chemical bonding procedures, or a vacuum system. A typical array may be produced by hand or using available methods and machines and contain any appropriate number of elements. After hybridization, nonhybridized probes are removed and a scanner used to determine the levels and patterns of fluorescence. The degree of complementarity and the relative abundance of each probe which hybridizes to an element on the microarray may be assessed through analysis of the scanned images.

[0373] In another alternative, full-length cDNAs or Expressed Sequence Tags (ESTs) comprise the elements of the microarray. Full-length cDNAs or ESTs representing a genome scan of thousand of unique nucleotide sequences, or corresponding to one of the nucleotide sequences of the present invention, are arranged on an appropriate substrate, e.g., a glass slide. The cDNA is fixed to the slide using, e.g., U.V. cross-linking followed, by thermal and chemical and subsequent drying. (See, e.g., Schena, M. et al. (1995) Science 270:467-470; and Shalon, D. et al. (1996) Genome Res. 6:639-645.) Fluorescent probes are prepared and used for hybridization to the elements on the substrate.

[0374] Probe sequences for microarrays may be selected by screening a large number of clones from a variety of cDNA libraries in order to find sequences with conserved protein motifs common to genes coding for signal sequence containing polypeptides. In one embodiment, sequences identified from cDNA libraries, are analyzed to identify those gene sequences with conserved protein motifs using an appropriate analysis program, e.g., the Block 2 Bioanalysis Program (Incyte, Palo Alto, Calif.). This motif analysis program, based on sequence information contained in the Swiss-Prot Database and PROSITE, is a method of determining the function of uncharacterized proteins translated from genomic or cDNA sequences. (See, e.g., Bairoch, A. et al. (1997) Nucleic Acids Res. 25:217-221; and Attwood, T. K. et al. (1997) J. Chem. Inf. Comput. Sci. 37:417-424.) PROSITE may be used to identify functional or structural domains that cannot be detected using conserved motifs due to extreme sequence divergence. The method is based on weight matrices. Motifs identified by this method are then calibrated against the SWISS-PROT database in order to obtain a measure of the chance distribution of the matches.

[0375] In another embodiment, Hidden Markov models (HMMs) may be used to find shared motifs, specifically consensus sequences. (See, e.g., Pearson, W. R. and D. J. Lipman (1988) Proc. Natl. Acad. Sci. USA 85:2444-2448; and Smith, T. F. and M. S. Waterman (1981) J. Mol. Biol. 147:195-197.) HMMs were initially developed to examine speech recognition patterns, but are now being used in a biological context to analyze protein and nucleic acid sequences as well as to model protein structure. (See, e.g., Krogh, A. et al. (1994) J. Mol. Biol. 235:1501-1531; and Collin, M. et al. (1993) Protein Sci. 2:305-314.) HMMs have a formal probabilistic basis and use position-specific scores for amino acids or nucleotides. The algorithm continues to incorporate information from newly identified sequences to increase its motif analysis capabilities.

[0376] Microarray Uses

[0377] Polynucleotide sequences are particularly useful when they are hybridizable array elements in a microarray. Such a microarray can be employed to monitor the expression of genes of unknown function, but which are differentially expressed in precancerous or cancerous tissue. In addition, the microarray can be used to monitor the expression of genes with a known function in tumor biology.

[0378] The microarray can be used for large scale genetic or gene expression analysis of a large number of polynucleotide sequences. The microarray can be used in the diagnosis of diseases, such as in the diagnosis of early stages of ductal carcinoma before other definitive symptoms are evident, and in the differential diagnosis of diseases with similar symptoms. The microarray can also be used in the monitoring and evaluation of treatments where altered expression of genes coding for polypeptides implicated in the control of cell proliferation cause disease, such as cancer. Additionally, the microarray can be used to investigate an individual's predisposition to a disease, such as cancer. Furthermore, the microarray can be employed to investigate cellular responses, such as cell proliferation and the like.

[0379] When the polynucleotide sequences are employed as hybridizable array elements in a microarray, the array elements are organized in an ordered fashion so that each element is present at a specified location on the substrate. Because the array elements are at specified locations on the substrate, the hybridization patterns and intensities (which together create a unique expression profile) can be interpreted in terms of expression levels of particular genes and can be correlated with a particular disease or condition or treatment.

[0380] With a large enough number of transcript profiles derived from different biological samples, a statistically significant correlation can emerge between cell and tissue source information, such as disease states, treatment outcomes, exposure to various environmental factors or genotypes, and the expression levels of particular genes or groups of genes. Comparisons between transcript profiles of different cells or tissues or of the same cells or tissues under different conditions can be used to discern differences in transcriptional activities. For example, a transcript profile can show differences occurring between two different tissues, such as liver and prostate; between normal and diseased tissue, such as normal and breast tumor or between untreated and treated tissues, such as prostate tumor and irradiated prostate tumor.

[0381] In another embodiment of the present invention, kits can be generated which contain the necessary reagents to carry out the assays of the present invention.

[0382] Specifically, the invention provides a compartmentalized kit to receive, in close confinement, one or more containers which comprises: (a) a first container comprising one of the nucleic acid molecules that can bind to a fragment of the human genome disclosed herein; and (b) one or more other containers comprising one or more of the following: wash reagents, reagents capable of detecting presence of a bound nucleic acid.

[0383] In detail, a compartmentalized kit includes any kit in which reagents are contained in separate containers. Such containers include small glass containers, plastic containers, strips of plastic, glass or paper, or arraying material such as silica. Such containers allows one to efficiently transfer reagents from one compartment to another compartment such that the samples and reagents are not cross-contaminated, and the agents or solutions of each container can be added in a quantitative fashion from one compartment to another. Such containers will include a container which will accept the test sample, a container which contains the nucleic acid probe, containers which contain wash reagents (such as phosphate buffered saline, Tris-buffers, etc.), and containers which contain the reagents used to detect the bound probe. One skilled in the art will readily recognize that the previously unidentified genes of the present invention can be routinely identified using the sequence information disclosed herein can be readily incorporated into one of the established kit formats which are well known in the art, particularly expression arrays.

[0384] RNA Isolation, Amplification, and Labeling for Microarray

[0385] RNA can be isolated from the sample according to any of a number of methods well known to those of skill in the art. For example, methods of purification of nucleic acids are described in Laboratory Techniques in Biochemistry and Molecular Biology: Hybridization With Nucleic Acid Targets, Part 1. Theory and Nucleic Acid Preparation, P. Tijssen, ed. Elsevier (1993). When sample polynucleotides are amplified it is desirable to amplify the nucleic acid sample and maintain the relative abundances of the original sample, including low abundance transcripts. Total mRNA can be amplified by reverse transcription using a reverse transcriptase, a primer consisting of oligo d(T), and a sequence encoding the phage T7 promoter to provide a single stranded DNA template. The second DNA strand is polymerized using a DNA polymerase and a RNAse which assists in breaking up the DNA/RNA hybrid. After synthesis of the double stranded DNA, T7 RNA polymerase can be added and RNA transcribed from the second DNA strand template (Van Gelder et al. U.S. Pat. No. 5,545,522). RNA can be amplified in vitro, in situ or in vivo (See Eberwine U.S. Pat. No. 5,514,545).

[0386] The polynucleotides may be labeled with one or more labeling moieties to allow for detection of hybridized polynucleotide complexes. The labeling moieties can include compositions that can be detected by spectroscopic, photochemical, biochemical, bioelectronic, immunochemical, electrical, optical or chemical means. The labeling moieties include radioisotopes, chemiluminescent compounds, labeled binding proteins, heavy metal atoms, spectroscopic markers, such as fluorescent markers and dyes, magnetic labels, linked enzymes, mass spectrometry tags, spin labels, electron transfer donors and acceptors, and the like.

[0387] Hybridization and Analysis of Microarrays

[0388] Hybridization causes a denatured polynucleotide and a denatured sample polynucleotide to form a stable duplex through base pairing. Hybridization methods are well known to those skilled in the art (See, for example, Laboratory Techniques in Biochemistry and Molecular Biology, Vol. 24: Hybridization With Nucleic Acid Targets, P. Tijssen, ed. Elsevier, N.Y. (1993)) Hybridization conditions can be defined by salt concentration, temperature, and other chemicals and conditions well known in the art. In particular, stringency can be increased by reducing the concentration of salt, or raising the hybridization temperature.

[0389] For example, stringent salt concentration will ordinarily be less than about 750 mM NaCl and 75 mM trisodium citrate, preferably less than about 500 mM NaCl and 50 mM trisodium citrate, and most preferably less than about 250 mM NaCl and 25 mM trisodium citrate. Stringent temperature conditions will ordinarily include temperatures of at least about 30° C., more preferably of at least about 37° C., and most preferably of at least about 60° C. Varying additional parameters, such as hybridization time, the concentration of detergent or solvent, and the inclusion or exclusion of carrier DNA, are well known to those skilled in the art. Additional variations on these conditions will be readily apparent to those skilled in the art (Wahl, G. M. and S. L. Berger (1987) Methods Enzymol. 152:399-407; Kimmel, A. R. (1987) Methods Enzymol. 152:507-511; Ausubel, F. M. et al. (1997) Short Protocols in Molecular Biology, John Wiley & Sons, New York, N.Y.; and Sambrook, J. et al. (2001) Molecular Cloning A Laboratory Manual, Cold Spring Harbor Press, Plainview, N.Y.).

[0390] Hybridization reactions can be performed in a differential hybridization format. In a differential hybridization format, the differential expression of a set of genes in two biological samples is analyzed. For differential hybridization, polynucleotides from both biological samples are prepared and labeled with different labeling moieties. A mixture of the two labeled polynucleotides is added to a microarray. The microarray is then examined under conditions in which the emissions from the two different labels are individually detectable. Polynucleotides in the microarray that are hybridized to substantially equal numbers of polynucleotides derived from both biological samples give a distinct combined fluorescence (Shalon et al. PCT publication WO95/35505). In a preferred embodiment, the fluorophores Cy3 and Cy5 (Amersham Pharmacia Biotech, Piscataway N.J.) are employed as labels.

[0391] After hybridization, the microarray is washed to remove nonhybridized nucleic acids and complex formation between the hybridizable array elements and the polynucleotides is detected. Methods for detecting complex formation are well known to those skilled in the art.

[0392] In a differential hybridization experiment, polynucleotides from two or more different biological samples are labeled with two or more different fluorescent labels with different emission wavelengths. Fluorescent signals are detected separately with different photomultipliers set to detect specific wavelengths. The relative abundances/expression levels of the polynucleotides in two or more samples is obtained.

[0393] Typically, microarray fluorescence intensities can be normalized to take into account variations in hybridization intensities when more than one microarray is used under similar test conditions. In a preferred embodiment, individual polynucleotide complex hybridization intensities are normalized using the intensities derived from internal normalization controls contained on each microarray.

[0394] The microarray can be used to monitor the expression level of large numbers of genes simultaneously and to identify splice variants, mutations, and polymorphisms. This information may be used to determine gene function, to understand the genetic basis of a disease, to diagnose a disease, and to develop and monitor the activities of therapeutic agents.

[0395] mRNA Expression Analysis Using Sybrgreen

[0396] Where possible, micro-array results were confirmed using the SYBR green procedure. The SYBR green PCR procedure is a way to perform real-time PCR using the SYBR Green 1 Dye. Direct detection of polymerase chain reaction (PCR) product is monitored by measuring the increase in fluorescence caused by the binding of SYBR green dye to double stranded DNA. Gene specific PCR oligonucleotide primer pairs were designed using the Primer Express 1.5 software. (Applied Biosystems, Foster City, Calif.)

[0397] One microgram of each mRNA is added to 100 uL of a reverse transcriptase reaction using the ABI Taqman reverse transcription reagents with random hexamers according to the manufacturers protocol (Applied Biosystems, Foster City, Calif.) The thermal cycling conditions included 1 cycle at 25° C. for 10 minutes, 1 cycle at 48° C. for 30 minutes and 1 cycle at 95° C. for 5 minutes. Four hundred microliters of water is then added to the cDNA reaction. The resulting cDNA (10 uL) is added to a 25 uL SYBR green PCR reaction mixture according to the manufactures protocol. (Applied Biosystems, Foster City, Calif.) The thermal cycling conditions included 1 cycle at 95° C. for ten minutes, 40 cycles at 95° C. for 15 s, annealing at 60° C. for 1 minute. Data are expressed as the fold increase normalized to the same gene using the delta delta CT method for relative quantitation. For comparison data obtained with cDNA from colon and breast tumors were compared to data from pools of normal colon and breast cDNA.

[0398] Antibodies

[0399] The present invention further provides antibodies to the proteins of the present invention. Exemplary antibodies include polyclonal, monoclonal, humanized, bispecific, and heteroconjugate antibodies.

[0400] Polyclonal Antibodies

[0401] The antibodies can comprise polyclonal antibodies. Methods of preparing polyclonal antibodies are known to the skilled artisan. Polyclonal antibodies can be raised in a mammal, for example, by one or more injections of an immunizing agent and, if desired, an adjuvant. Typically, the immunizing agent and/or adjuvant will be injected in the mammal by multiple subcutaneous or intraperitoneal injections. The immunizing agent can include the polypeptide or a fusion protein thereof. It can be useful to conjugate the immunizing agent to a protein known to be immunogenic in the mammal being immunized. Examples of such immunogenic proteins include but are not limited to keyhole limpet hemocyanin, serum albumin, bovine thyroglobulin, and soybean trypsin inhibitor. Examples of adjuvants that can be employed include Freund's complete adjuvant and MPL-TDM adjuvant (monophosphoryl Lipid A, synthetic trehalose dicorynomycolate). Alternatively, genetic immunization may a usefull approach to generating antibodies without having to purify the protein of interest (Kilpatrick et al., 17:569-576, 1998). The immunization protocol can be selected by one skilled in the art without undue experimentation.

[0402] Monoclonal Antibodies

[0403] The antibodies can, alternatively, be monoclonal antibodies. Monoclonal antibodies can be prepared using hybridoma methods, such as those described by Kohler and Milstein, Nature, 256:495 (1975). In a hybridoma method, a mouse, hamster, or other appropriate host animal, is typically immunized with an immunizing agent to elicit lymphocytes that produce or are capable of producing antibodies that will specifically bind to the immunizing agent. Alternatively, the lymphocytes can be immunized in vitro.

[0404] The immunizing agent will typically include the polypeptide or a fusion protein thereof. Generally, either peripheral blood lymphocytes (“PBLs”) are used if cells of human origin are desired, or spleen cells or lymph node cells are used if non-human mammalian sources are desired. The lymphocytes are then fused with an immortalized cell line using a suitable fusing agent, such as polyethylene glycol, to form a hybridoma cell (Goding, Monoclonal Antibodies: Principles and Practice, Academic Press, (1986) pp. 59-103). Immortalized cell lines are usually transformed mammalian cells, particularly myeloma cells of rodent, bovine, and human origin. Usually, rat or mouse myeloma cell lines are employed. The hybridoma cells can be cultured in a suitable culture medium that preferably contains one or more substances that inhibit the growth or survival of the unfused immortalized cells. For example, if the parental cells lack the enzyme hypoxanthine guanine phosphoribosyl transferase (HGPRT or HPRT), the culture medium for the hybridomas typically will include hypoxanthine, aminopterin, and thymidine (“HAT medium”), which substances prevent the growth of HGPRT-deficient cells.

[0405] Preferred immortalized cell lines are those that fuse efficiently, support stable high level expression of antibody by the selected antibody-producing cells, and are sensitive to a medium such as HAT medium. More preferred immortalized cell lines are murine myeloma lines, which can be obtained, for instance, from the Salk Institute Cell Distribution Center, San Diego, Calif. and the American Type Culture Collection, Manassas, Va. Human myeloma and mouse-human heteromyeloma cell lines also have been described for the production of human monoclonal antibodies (Kozbor, J. Immunol., 133:3001(1984); Brodeur et al., Monoclonal Antibody Production Techniques and Applications, Marcel Dekker, Inc., New York, (1987) pp. 51-63).

[0406] The culture medium in which the hybridoma cells are cultured can then be assayed for the presence of monoclonal antibodies directed against a protein of the present invention. Preferably, the binding specificity of monoclonal antibodies produced by the hybridoma cells is determined by immunoprecipitation or by an in vitro binding assay, such as radioimmunoassay (RIA) or enzyme-linked immunoabsorbent assay (ELISA). Such techniques and assays are known in the art. The binding affinity of the monoclonal antibody can, for example, be determined by the Scatchard analysis of Munson and Pollard, Anal. Biochem., 107:220 (1980).

[0407] After the desired hybridoma cells are identified, the clones can be subcloned by limiting dilution procedures and grown by standard methods (Goding, supra). Suitable culture media for this purpose include, for example, Dulbecco's Modified Eagle's Medium and RPMI1640 medium. Alternatively, the hybridoma cells can be grown in vivo as ascites in a mammal. The monoclonal antibodies secreted by the subclones can be isolated or purified from the culture medium or ascites fluid by conventional immunoglobulin purification procedures such as, for example, protein A-Sepharose, hydroxylapatite chromatography, gel electrophoresis, dialysis, or affinity chromatography.

[0408] The monoclonal antibodies can also be made by recombinant DNA methods, such as those described in U.S. Pat. No. 4,816,567. DNA encoding the monoclonal antibodies of the invention can be readily isolated and sequenced using conventional procedures (e.g., by using oligonucleotide probes that are capable of binding specifically to genes encoding the heavy and light chains of murine antibodies). The hybridoma cells of the invention serve as a preferred source of such DNA. Once isolated, the DNA can be placed into expression vectors, which are then transfected into host cells such as simian COS cells, Chinese hamster ovary (CHO) cells, or myeloma cells that do not otherwise produce immunoglobulin protein, to obtain the synthesis of monoclonal antibodies in the recombinant host cells. The DNA also can be modified, for example, by substituting the coding sequence for human heavy and light chain constant domains in place of the homologous murine sequences (U.S. Pat. No. 4,816,567; Morrison et al., PNAS, 81:6851-6855 (1984)) or by covalently joining to the immunoglobulin coding sequence all or part of the coding sequence for a non-immunoglobulin polypeptide. Such a non-immunoglobulin polypeptide can be substituted for the constant domains of an antibody of the invention, or can be substituted for the variable domains of one antigen-combining site of an antibody of the invention to create a chimeric bivalent antibody. The antibodies can be monovalent antibodies. Methods for preparing monovalent antibodies are well known in the art. For example, one method involves recombinant expression of immunoglobulin light chain and modified heavy chain. The heavy chain is truncated generally at any point in the Fc region so as to prevent heavy chain crosslinking. Alternatively, the relevant cysteine residues are substituted with another amino acid residue or are deleted so as to prevent crosslinking.

[0409] In vitro methods are also suitable for preparing monovalent antibodies. Digestion of antibodies to produce fragments thereof, particularly, Fab fragments, can be accomplished using routine techniques known in the art.

[0410] Human and Humanized Antibodies

[0411] The antibodies of the invention can further comprise humanized antibodies or human antibodies. Humanized forms of non-human (e.g., murine) antibodies are chimeric immunoglobulins, immunoglobulin chains or fragments thereof (such as Fv, Fab, Fab′, F(ab′), or other antigen-binding subsequences of antibodies) which contain minimal sequence derived from non-human immunoglobulin. Humanized antibodies include human immunoglobulins (recipient antibody) in which residues from a complementary determining region (CDR) of the recipient are replaced by residues from a CDR of a non-human species (donor antibody) such as mouse, rat, or rabbit having the desired specificity, affinity and capacity. In some instances, Fv framework residues of the human immunoglobulin are replaced by corresponding nonhuman residues. Humanized antibodies can also comprise residues, which are found neither in the recipient antibody nor in the imported CDR or framework sequences. In general, the humanized antibody will comprise substantially all of at least one, and typically two, variable domains, in which all or substantially all of the CDR regions correspond to those of a nonhuman immunoglobulin and all or substantially all of the framework regions (FR) are those of a human immunoglobulin consensus sequence. The humanized antibody optimally also will comprise at least a portion of an immunoglobulin constant region (Fc), typically that of a human immunoglobulin (Jones et al., Nature, 321:522-525 (1986); Riechmann et al., Nature, 332:323329 (1988); and Presta, Curr. Op. Struct. Biol.,2:593-596 (1992)).

[0412] Methods for humanizing non-human antibodies are well known in the art. Generally, a humanized antibody has one or more amino acid residues introduced into it from a source that is non-human. These non-human amino acid residues are often referred to as “import” residues, which are typically taken from an “import” variable domain. Humanization can be essentially performed following the method of Winter and co-workers (Jones et al., Nature, 321:522-525 (1986); Riechmann et al., Nature, 332:323-327 (1988); Verhoeyen et al., Science, 239:1534-1536 (1988)), by substituting rodent CDRs or CDR sequences for the corresponding sequences of a human antibody. Accordingly, such “humanized” antibodies are chimeric antibodies (U.S. Pat. No. 4,816,567), wherein substantially less than an intact human variable domain has been substituted by the corresponding sequence from a non-human species. In practice, humanized antibodies are typically human antibodies in which some CDR residues and possibly some FR residues are substituted by residues from analogous sites in rodent antibodies.

[0413] Human antibodies can also be produced using various techniques known in the art, including phage display libraries (Homogenous and Winter, J. Mol. Biol., 227:381 (1991); Marks et al., J. Mol. Biol., 222:581 (1991)). The techniques of Cole et al. and Boerner et al. are also available for the preparation of human monoclonal antibodies (Cole et al., Monoclonal Antibodies and Cancer Therapy, Alan R. Liss, p. 77 (1985) and Boerner et al., J. Immunol., 147(1):86-95 (1991)). Similarly, human antibodies can be made by introducing of human immunoglobulin loci into transgenic animals, e.g., mice in which the endogenous immunoglobulin genes have been partially or completely inactivated. Upon challenge, human antibody production is observed, which closely resembles that seen in humans in all respects, including gene rearrangement, assembly, and antibody repertoire. This approach is described, for example, in U.S. Pat. Nos. 5,545,807; 5,545,806; 5,569,825; 5,625,126; 5,633,425; 5,661,016, and in the following scientific publications: Marks et al., Bio/Technology 10, 779783 (1992); Lonberg et al., Nature 368 856-859 (1994); Morrison, Nature 368, 812-13 (1994); Fishwild et al., Nature Biotechnology 14, 845-51 (1996); Neuberger, Nature Biotechnology 14, 826 (1996); Lonberg and Huszar, Intern. Rev. Immunol. 13, 65-93 (1995); Tomizuka et al., PNAS 97, 722-727 (2000).

[0414] Bispecific Antibodies

[0415] Bispecific antibodies are monoclonal, preferably human or humanized, antibodies that have binding specificities for at least two different antigens. In the present case, one of the binding specificities is for a protein of the present invention; the other one is for any other antigen, and preferably for a cell-surface protein or receptor or receptor subunit.

[0416] Methods for making bispecific antibodies are known in the art. Traditionally, the recombinant production of bispecific antibodies is based on the co-expression of two immunoglobulin heavy-chain/light-chain pairs, where the two heavy chains have different specificities (Milstein and Cuello, Nature, 305:537-539 (1983)). Because of the random assortment of immunoglobulin heavy and light chains, these hybridomas (quadromas) produce a potential mixture of ten different antibody molecules, of which only one has the correct bispecific structure. The purification of the correct molecule is usually accomplished by affinity chromatography steps. Similar procedures are disclosed in WO 93/08829, published 13 May 1993, and in Traunecker et al., EMBO J., 10:3655-3659 (1991).

[0417] Antibody variable domains with the desired binding specificities (antibody-antigen combining sites) can be fused to immunoglobulin constant domain sequences. The fusion preferably is with an immunoglobulin heavy-chain constant domain, comprising at least part of the hinge, CH2, and CH3 regions. It is preferred to have the first heavy-chain constant region (CH1) containing the site necessary for light-chain binding present in at least one of the fusions. DNAs encoding the immunoglobulin heavy-chain fusions and, if desired, the immunoglobulin light chain, are inserted into separate expression vectors, and are cotransfected into a suitable host organism. For further details of generating bispecific antibodies see, for example, Suresh et al., Methods in Enzymology, 121:210 (1986).

[0418] According to another approach described in WO 96/27011, the interface between a pair of antibody molecules can be engineered to maximize the percentage of heterodimers, which are recovered from recombinant cell culture. The preferred interface comprises at least a part of the CH3 region of an antibody constant domain. In this method, one or more small amino acid side chains from the interface of the first antibody molecule are replaced with larger side chains (e.g. tyrosine or tryptophan). Compensatory “cavities” of identical or similar size to the large side chain(s) are created on the interface of the second antibody molecule by replacing large amino acid side chains with smaller ones (e.g. alanine or threonine). This provides a mechanism for increasing the yield of the heterodimer over other unwanted end products such as homodimers.

[0419] Bispecific antibodies can be prepared as full-length antibodies or antibody fragments (e.g. F(ab′)₂ bispecific antibodies). Techniques for generating bispecific antibodies from antibody fragments have been described in the literature. For example, bispecific antibodies can be prepared can be prepared using chemical linkage. Brennan et al, Science 229:81 (1985) describe a procedure wherein intact antibodies are proteolytically cleaved to generate F(ab′)₂ fragments. These fragments are reduced in the presence of the dithiol complexing agent sodium arsenite to stabilize vicinal dithiols and prevent intermolecular disulfide formation. The Fab′ fragments generated are then converted to thionitrobenzoate (TNB) derivatives. One of the Fab′-TNB derivatives is then reconverted to the Fab′-thiol by reduction with mercaptoethylamine and is mixed with an equimolar amount of the other Fab′-TNB derivative to form the bispecific antibody. The bispecific antibodies produced can be used as agents for the selective immobilization of enzymes.

[0420] Fab′ fragments can be directly recovered from E. coli and chemically coupled to form bispecific antibodies. Shalaby et al., J. Exp. Med. 175:217-225 (1992) describe the production of a fully humanized bispecific antibody F(ab′)₂ molecule. Each Fab′ fragment was separately secreted from E. coli and subjected to directed chemical coupling in vitro to form the bispecific antibody. The bispecific antibody thus formed was able to bind to cells overexpressing the ErbB2 receptor and normal human T cells, as well as trigger the lytic activity of human cytotoxic lymphocytes against human breast tumor targets.

[0421] Various techniques for making and isolating bispecific antibody fragments directly from recombinant cell culture have also been described. For example, bispecific antibodies have been produced using leucine zippers. Kostelny et al., J. Immunol. 148(5): 1547-1553 (1992). The leucine zipper peptides from the Fos and Jun proteins were linked to the Fab′ portions of two different antibodies by gene fusion. The antibody homodimers were reduced at the hinge region to form monomers and then re-oxidized to form the antibody heterodimers. This method can also be utilized for the production of antibody homodimers. The “diabody” technology described by Hollinger et al., Proc. Natl. Acad. Sci. USA 90:6444-6448 (1993) has provided an alternative mechanism for making bispecific antibody fragments. The fragments comprise a heavy-chain variable domain (V_{H}) connected to a light-chain variable domain (V_{L}) by a linker, which is too short to allow pairing between the two domains on the same chain. Accordingly, the V_{H} and V_{L} domains of one fragment are forced to pair with the complementary V_{L} and V_{H} domains of another fragment, thereby forming two antigen-binding sites. Another strategy for making bispecific antibody fragments by the use of single-chain Fv (sFv) dimers has also been reported. See, Gruber et al., J. Immunol. 152:5368 (1994).

[0422] Antibodies with more than two valencies are contemplated. For example, trispecific antibodies can be prepared. Tutt et al., J. Immunol. 147:60 (1991). Exemplary bispecific antibodies can bind to two different epitopes on a given polypeptide herein. Alternatively, an arm can be combined with an arm which binds to a triggering molecule on a leukocyte such as a T-cell receptor molecule (e.g. CD2, CD3, CD28, or B7), or Fc receptors for IgG (FcyR), such as FcyRI (CD64), FcyRII (CD32) and FcyRIII (CD16) so as to focus cellular defense mechanisms to the cell expressing the particular a protein of the present invention. Bispecific antibodies can also be used to localize cytotoxic agents to cells, which express a particular a protein of the present invention. These antibodies possess a binding arm to a protein of the present invention and an arm, which binds a cytotoxic agent or a radionuclide chelator, such as EOTUBE, DPTA, DOTA, or TETA. Another bispecific antibody of interest binds the polypeptide and further binds tissue factor (TF).

[0423] Heteroconjugate Antibodies

[0424] Heteroconjugate antibodies are also within the scope of the present invention. Heteroconjugate antibodies are composed of two covalently joined antibodies. Such antibodies have, for example, been proposed to target immune system cells to unwanted cells (U.S. Pat. No. 4,676,980), and for treatment of HIV infection (WO 91/00360; WO 92/200373; EP 03089). It is contemplated that the antibodies can be prepared in vitro using known methods in synthetic protein chemistry, including those involving crosslinking agents. For example, immunotoxins can be constructed using a disulfide exchange reaction or by forming a thioether bond. Examples of suitable reagents for this purpose include iminothiolate, methyl-4-mercaptobutyrimidate, and those disclosed, for example, in U.S. Pat. No. 4,676,980.

[0425] Effector Function Engineering

[0426] It can be desirable to modify the antibody of the invention with respect to effector function, so as to enhance, e.g., the effectiveness of the antibody in treating cancer. For example, cysteine residue(s) can be introduced into the Fc region, thereby allowing interchain disulfide bond formation in this region. The homodimeric antibody thus generated can have improved internalization capability and/or increased complement-mediated cell killing and antibody-dependent cellular cytotoxicity (ADCC). See Caron et al., J. Exp Med., 176: 11911195 (1992) and Shopes, J. Immunol., 148: 2918-2922 (1992). Homodimeric antibodies with enhanced anti-tumor activity can also be prepared using heterobifunctional cross-linkers as described in Wolff et al. Cancer Research, 53: 2560-2565 (1993). Alternatively, an antibody can be engineered that has dual Fc regions and can thereby have enhanced complement lysis and ADCC capabilities. See Stevenson et al., Anti-Cancer Drug Design, 3: 219-230 (1989).

[0427] Immunoconjugates

[0428] The invention also pertains to immunoconjugates comprising an antibody conjugated to a cytotoxic agent such as a chemotherapeutic agent, toxin (e.g., an enzymatically active toxin of bacterial, fungal, plant, or animal origin, or fragments thereof), or a radioactive isotope (i.e., a radioconjugate).

[0429] Chemotherapeutic agents useful in the generation of such immunoconjugates have been described above. Enzymatically active toxins and fragments thereof that can be used include diphtheria A chain, nonbinding active fragments of diphtheria toxin, exotoxin A chain (from Pseudomonas aeruginosa), ricin A chain, abrin A chain, modeccin A chain, alpha-sarcin, Aleurites fordii proteins, dianthin proteins, momordica charantia inhibitor, curcin, crotin, sapaonaria officinalis inhibitor, gelonin, mitogellin, restrictocin, phenomycin, maytansinoids, enomycin, and the tricothecenes. A variety of radionuclides are available for the production of radioconjugated antibodies. Examples include ²¹²Bi, ¹³¹I, ¹³¹In, ⁹⁰Y, and ¹⁸⁶Re.

[0430] Conjugates of the antibody and cytotoxic agent are made using a variety of bifunctional protein-coupling agents such as N-succinimidyl-3-(2-pyridyldithiol) propionate (SPDP), iminothiolane (IT), bifunctional derivatives of imidoesters (such as dimethyl adipimidate HCL), active esters (such as disuccinimidyl suberate), aldehydes (such as glutareldehyde), bisazido compounds (such as bis (p-azidobenzoyl) hexanediamine), bis-diazonium derivatives (such as bis-(p-diazoniumbenzoyl)-ethylenediamine), diisocyanates (such as tolyene 2,6-diisocyanate), and bis-active fluorine compounds (such as 1,5-difluoro-2,4-dinitrobenzene). For example, a ricin immunotoxin can be prepared as described in Vitetta et al., Science, 238: 1098 (1987). Carbon-14-labeled 1-isothiocyanatobenzyl-3-methyldiethylene triaminepentaacetic acid (MX-DTPA) is an exemplary chelating agent for conjugation of radionucleotide to the antibody. See WO94/11026.

[0431] In another embodiment, the antibody can be conjugated to a “receptor” (such streptavidin) for utilization in tumor pretargeting wherein the antibody-receptor conjugate is administered to the patient, followed by removal of unbound conjugate from the circulation using a clearing agent and then administration of a “ligand” (e.g., avidin) that is conjugated to a cytotoxic agent (e.g., a radionucleotide).

[0432] Immunoliposomes

[0433] The antibodies disclosed herein can also be formulated as immunoliposomes. Liposomes containing the antibody are prepared by methods known in the art, such as described in Epstein et al., Proc. Natl. Acad. Sci. USA, 82: 3688 (1985); Hwang et al., Proc. Natl. Acad. Sci. USA, 77: 4030 (1980); and U.S. Pat. Nos. 4,485,045 and 4,544,545. Liposomes with enhanced circulation time are disclosed in U.S. Pat. No. 5,013,556.

[0434] Particularly useful liposomes can be generated by the reverse-phase evaporation method with a lipid composition comprising phosphatidylcholine, cholesterol, and PEG derivatized phosphatidylethanolamine (PEG-PE). Liposomes are extruded through filters of defined pore size to yield liposomes with the desired diameter. Fab′ fragments of the antibody of the present invention can be conjugated to the liposomes as described in Martin et al., J. Biol. Chem., 257: 286-288 (1982) via a disulfide-interchange reaction. A chemotherapeutic agent (such as Doxorubicin) is optionally contained within the liposome. See Gabizon et al., J. National Cancer Inst., 81(19): 1484 (1989).

[0435] Methods of Detecting Proteins and Nucleic Acids

[0436] The invention also provides a method for detecting the presence or absence of a protein of the present invention in a biological sample. The method includes obtaining a biological sample from a test subject and contacting the biological sample with a compound or an agent capable of detecting protein or nucleic acid (e.g., mRNA, genomic DNA) that encodes protein such that the presence of a protein of the present invention is detected in the biological sample. An agent for detecting mRNA or genomic DNA is a labeled nucleic acid probe capable of hybridizing to mRNA or genomic DNA. The nucleic acid probe can be, for example, a full-length nucleic acid, such as the nucleic acid of SEQ ID NOs:1-1, SEQ ID NOs:13-38, SEQ ID NO:3113, or a fragment thereof, such as SEQ ID NOs:77-3011, SEQ ID NOs:3012-3083, or an oligonucleotide of at least 15, 30, 50, 100, 250 or 500 nucleotides in length and sufficient to specifically hybridize under stringent conditions to mRNA or genomic DNA. Other suitable probes for use in the diagnostic assays of the invention are described herein.

[0437] An agent for detecting protein is an antibody capable of binding to protein, preferably an antibody with a detectable label. Antibodies can be polyclonal, or more preferably, monoclonal. An intact antibody, or a fragment thereof (e.g. Fab or F(ab′)₂ can be used. The term “labeled”, with regard to the probe or antibody, is intended to encompass direct labeling of the probe or antibody by coupling (i.e., physically linking) a detectable substance to the probe or antibody, as well as indirect labeling of the probe or antibody by reactivity with another reagent that is directly labeled. Examples of indirect labeling include detection of a primary antibody using a fluorescently labeled secondary antibody and end-labeling of a DNA probe with biotin such that it can be detected with fluorescently labeled streptavidin. The term “biological sample” is intended to include tissues, cells, and biological fluids isolated from a subject, as well as tissues, cells and fluids present within a subject. That is, the detection method of the invention can be used to detect mRNA, protein, or genomic DNA in a biological sample in vitro as well as in vivo. For example, in vitro techniques for detection of mRNA include Northern hybridizations and in situ hybridizations. In vitro techniques for detection of protein include enzyme linked immunosorbent assays (ELISAs), Western blots, immunoprecipitations and immunofluorescence. In vitro techniques for detection of genomic DNA include Southern hybridizations. Furthermore, in vivo techniques for detection of protein include introducing into a subject a labeled antibody. For example, the antibody can be labeled with a radioactive marker whose presence and location in a subject can be detected by standard imaging techniques.

[0438] In one embodiment, the biological sample contains protein molecules from the test subject. Alternatively, the biological sample can contain mRNA molecules from the test subject or genomic DNA molecules from the test subject.

[0439] In another embodiment, the methods further involve obtaining a control biological sample from a control subject, contacting the control sample with a compound or agent capable of detecting protein, mRNA, or genomic DNA, such that the presence of protein, mRNA or genomic DNA is detected in the biological sample, and comparing the presence of protein, mRNA or genomic DNA in the control sample with the presence of protein, mRNA or genomic DNA in the test sample.

[0440] Uses for Ab in Diagnostics and Affinity Purification

[0441] The antibodies to the proteins of the invention have various utilities. For example, antibodies can be used in diagnostic assays for a protein of the present invention, e.g., detecting its expression in specific cells, tissues, or serum. Various diagnostic assay techniques known in the art can be used, such as competitive binding assays, direct or indirect sandwich assays and immunoprecipitation assays conducted in either heterogeneous or homogeneous phases (Zola, Monoclonal Antibodies: A Manual of Techniques, CRC Press, Inc. (1987) pp. 147-158). The antibodies used in the diagnostic assays can be labeled with a detectable moiety. The detectable moiety should be capable of producing, either directly or indirectly, a detectable signal. For example, the detectable moiety can be a radioisotope, such as ³H, ¹⁴C, ³²P, ³⁵S, or ¹²⁵I, a fluorescent or chemiluminescent compound, such as fluorescein isothiocyanate, rhodamine, or luciferin, or an enzyme, such as alkaline phosphatase, beta-galactosidase or horseradish peroxidase. Any method known in the art for conjugating the antibody to the detectable moiety can be employed, including those methods described by Hunter et al., Nature, 144:945 (1962); David et al., Biochemistry, 13:1014 (1974); Pain et al., J. Immunol. Meth., 40:219 (1981); and Nygren, J. Histochem. and Cytochem., 30:407 (1982).

[0442] A competition assay may be employed wherein antibodies specific to the polypeptide are attached to a solid support and the labeled polypeptide and a sample derived from the host are passed over the solid support and the amount of label detected attached to the solid support can be correlated to a quantity of polypeptide in the sample.

[0443] Antibodies to a protein of the present invention also are useful for the affinity purification of a protein of the present invention from recombinant cell culture or natural sources. In this process, the antibodies are immobilized on a suitable support, such a Sephadex resin or filter paper, using methods well known in the art. The immobilized antibody then is contacted with a sample containing a protein of the present invention to be purified, and thereafter the support is washed with a suitable solvent that will remove substantially all the material in the sample except the a protein of the present invention, which is bound to the immobilized antibody. Finally, the support is washed with another suitable solvent that will release the protein of the present invention from the antibody.

[0444] Binding Assays

[0445] In binding assays, the interaction is binding and the complex formed can be isolated or detected in the reaction mixture. In a particular embodiment, the polypeptide encoded by the gene identified herein or the drug candidate is immobilized on a solid phase, e.g., on a microtiter plate, by covalent or non-covalent attachments. Non-covalent attachment generally is accomplished by coating the solid surface with a solution of the polypeptide and drying. Alternatively, an immobilized antibody, e.g., a monoclonal antibody, specific for the polypeptide to be immobilized can be used to anchor it to a solid surface. The assay is performed by adding the non-immobilized component, which can be labeled by a detectable label, to the immobilized component, e.g., the coated surface containing the anchored component. When the reaction is complete, the non-reacted components are removed, e.g., by washing, and complexes anchored on the solid surface are detected. When the originally non-immobilized component carries a detectable label, the detection of label immobilized on the surface indicates that complexing occurred. Where the originally non-immobilized component does not carry a label, complexing can be detected, for example, by using a labeled antibody specifically binding the immobilized complex.

[0446] If the candidate compound interacts with but does not bind to a particular polypeptide encoded by a gene identified herein, its interaction with that polypeptide can be assayed by methods well known for detecting protein-protein interactions. Such assays include traditional approaches, such as, e.g., cross-linking, co-immunoprecipitation, and co-purification through gradients or chromatographic columns. In addition, protein-protein interactions can be monitored by using a yeast-based genetic system described by Fields and co-workers (Fields and Song, Nature (London), 340:245-246 (1989); Chien et al., Proc. Natl. Acad. Sci. USA, 88:9578-9582 (1991)) as disclosed by Chevrel and Nathans, Proc. Natl. Acad. Sci. USA, 89: 5789-5793 (1991). Many transcriptional activators, such as yeast GAL4, consist of two physically discrete modular domains, one acting as the DNA-binding domain, and the other one functioning as the transcription-activation domain. The yeast expression system described in the foregoing publications (generally referred to as the “two-hybrid system”) takes advantage of this property, and employs two hybrid proteins, one in which the target protein is fused to the DNA-binding domain of GAL4, and another, in which candidate activating proteins are fused to the activation domain. The expression of a GAL4-lacZ reporter gene under control of a GAL4-activated promoter depends on reconstitution of GALA activity via protein-protein interaction. Colonies containing interacting polypeptides are detected with a chromogenic substrate for β-galactosidase. A complete kit (MATCHMAKER™) for identifying protein-protein interactions between two specific proteins using the two-hybrid technique is commercially available from Clontech. This system can also be extended to map protein domains involved in specific protein interactions as well as to pinpoint amino acid residues that are crucial for these interactions.

[0447] Identification of Receptor/Binding Protein

[0448] Antagonists can be detected by combining the polypeptide and a potential antagonist with membrane-bound polypeptide receptors or recombinant receptors or a binding protein under appropriate conditions for a competitive inhibition assay. The polypeptide can be labeled, such as by radioactivity, such that the number of polypeptide molecules bound to the receptor or binding protein can be used to determine the effectiveness of the potential antagonist. The gene encoding the receptor or binding protein can be identified by numerous methods known to those of skill in the art, for example, ligand panning and FACS sorting (Coligan et al., Current Protocols in Immun., 1(2): Chapter 5 (1991)).

[0449] Preferably, expression cloning is employed wherein polyadenylated RNA is prepared from a cell responsive to the polypeptide and a cDNA library created from this RNA is divided into pools and used to transfect COS cells or other cells that are not responsive to or do not contain binding protein activity to the polypeptide. Transfected cells that are grown on glass slides are exposed to labeled polypeptide or lysates are prepared for testing binding activity. The polypeptide can be labeled by a variety of means including iodination or inclusion of a recognition site for a site-specific protein kinase. Following fixation and incubation, the slides are subjected to autoradiographic analysis. Positive pools are identified and sub-pools are prepared and re-transfected using an interactive sub-pooling and re-screening process, eventually yielding a single clone that encodes the putative receptor or binding protein. As an alternative approach for receptor or binding protein identification, labeled polypeptide can be photoaffinity-linked with cell membrane or extract preparations that express or contain the receptor or binding protein. Cross-linked material is resolved by PAGE and exposed to X-ray film. The labeled complex can be excised, resolved into peptide fragments, and subjected to protein micro sequencing. The amino acid sequence obtained from micro sequencing would be used to design a set of degenerate oligonucleotide probes to screen a cDNA library to identify the gene encoding the putative receptor or binding protein.

[0450] More specific examples of potential antagonists include a polypeptide that binds to the fusions of immunoglobulin with polypeptide, and, in particular, antibodies including, without limitation, poly- and monoclonal antibodies and antibody fragments, single-chain antibodies, anti-idiotypic antibodies, and chimeric or humanized versions of such antibodies or fragments, as well as human antibodies and antibody fragments or conjugated antibodies. Alternatively, a potential antagonist can be a closely related protein, for example, a mutated form of the polypeptide that recognizes the receptor or binding protein but imparts no effect, thereby competitively inhibiting the action of the polypeptide.

[0451] Inhibitors of Binding Interactions

[0452] When the coding sequences for a polypeptide encode a protein which binds to another protein, the polypeptide can be used in assays to identify the other proteins or molecules involved in the binding interaction. By such methods, inhibitors of the binding interaction can be identified. Proteins involved in such binding interactions can also be used to screen for peptide or small molecule inhibitors or agonists of the binding interaction. Also, the receptor of a protein of the present invention can be used to isolate correlative ligand(s). Screening assays can be designed to find lead compounds that mimic the biological activity of a native protein or a receptor for the protein. Such screening assays will include assays amenable to high-throughput screening of chemical libraries, making them particularly suitable for identifying small molecule drug candidates. Small molecules contemplated include both synthetic organic or inorganic compounds. The assays can be performed in a variety of formats, including protein-protein binding assays, biochemical screening assays, immunoassays and cell based assays, which are well characterized in the art. Such high- and ultra-high throughput assays can also be used to test antisense molecules.

[0453] Methods for Identifying Modulators of Expression or Activity Cell Based Assays

[0454] The invention provides a method for identifying modulators, i.e., candidate or test compounds or agents (e.g., antibodies to the polypeptides encoded by nucleic acids of SEQ ID NO:77-3011, an antisense nucleic acid molecule, peptides, a polypeptide agonist, a polypeptide antagonist, peptidomimetics, small molecules or other drugs) that bind to the proteins of the present invention or have a stimulatory or inhibitory effect on, for example, expression or activity.

[0455] In one embodiment, the invention provides assays for screening candidate or test compounds, which bind to or modulate the activity of the membrane-bound form of a protein or polypeptide or biologically active portion thereof. The test compounds of the present invention can be obtained using any of the numerous approaches in combinatorial library methods known in the art, including: biological libraries; spatially addressable parallel solid phase or solution phase libraries; synthetic library methods requiring deconvolution; the “one-bead one-compound” library method; and synthetic library methods using affinity chromatography selection. The biological library approach is limited to peptide libraries, while the other four approaches are applicable to peptide, non-peptide oligomer, or small molecule libraries of compounds (Lam (1997) Anticancer Drug Des 12:145).

[0456] Examples of methods for the synthesis of molecular libraries can be found in the art, for example in: DeWitt et al. (1993) Proc Natl Acad Sci U.S.A. 90:6909; Erb et al. (1994) Proc Natl Acad Sci U.S.A. 91:11422; Zuckermann et al. (1994) J Med Chem 37:2678; Cho et al. (1993) Science 261:1303; Carrell et al. (1994) Angew Chem Int Ed Engl 33:2059; Carrell et al. (1994) Angew Chem Int Ed Engl 3 3:2061; and Gallop et al. (1994) J Med Chem 3 7:123 3.

[0457] Libraries of compounds may be presented in solution (e.g., Houghten (1992) Biotechniques 13:412-421), or on beads (Lam (1991) Nature 354:82-84), on chips (Fodor (1993) Nature 364:555-556), bacteria (Ladner U.S. Pat. No. 5,223,409), spores (Ladner U.S. Pat. No. '409), plasmids (Cull et al. (1992) Proc Natl Acad Sci USA 89:1865-1869) or on phage (Scott and Smith (1990) Science 249:386-390; Devlin (1990) Science 249:404-406; Cwirla et al. (1990) Proc Natl Acad Sci USA 87:6378-6382; Felici (1991) J Mol Biol 222:301-310; Ladner above.).

[0458] In one embodiment, an assay is a cell-based assay in which a cell that expresses a membrane-bound form of protein, or a biologically active portion thereof, on the cell surface is contacted with a test compound and the ability of the test compound to bind to a protein determined. The cell, for example, can be of mammalian origin or a yeast cell. Determining the ability of the test compound to bind to the protein can be accomplished, for example, by coupling the test compound with a radioisotope or enzymatic label such that binding of the test compound to the protein or biologically active portion thereof can be determined by detecting the labeled compound in a complex. For example, test compounds can be labeled with ¹²⁵I, ³⁵S, ¹⁴C, or ³H, either directly or indirectly, and the radioisotope detected by direct counting of radioemission or by scintillation counting. Alternatively, test compounds can be enzymatically labeled with, for example, horseradish peroxidase, alkaline phosphatase, or luciferase, and the enzymatic label detected by determination of conversion of an appropriate substrate to product. In one embodiment, the assay comprises contacting a cell which expresses a membrane-bound form of protein; or a biologically active portion thereof, on the cell surface with a known compound which binds the polypeptide of the present invention to form an assay mixture, contacting the assay mixture with a test compound, and determining the ability of the test compound to interact with a protein, wherein determining the ability of the test compound to interact with a protein comprises determining the ability of the test compound to preferentially bind to a polypeptide of the preset invention or a biologically active portion thereof as compared to the known compound.

[0459] In another embodiment, an assay is a cell-based assay comprising contacting a cell expressing a membrane-bound form of protein, or a biologically active portion thereof, on the cell surface with a test compound and determining the ability of the test compound to modulate (e.g., stimulate or inhibit) the activity of the protein or biologically active portion thereof. Determining the ability of the test compound to modulate the activity of the protein of the present invention or a biologically active portion thereof can be accomplished, for example, by determining the ability of the protein to bind to or interact with a target molecule. As used herein, a “target molecule” is a molecule with which a protein binds or interacts in nature, for example, a molecule on the surface of a cell which expresses a protein that interacts with a protein of the present invention, a molecule on the surface of a second cell, a molecule in the extracellular milieu, a molecule associated with the internal surface of a cell membrane or a cytoplasmic molecule. A target molecule can be a molecule other than of the present invention or a protein or polypeptide of the present invention. In one embodiment, a target molecule is a component of a signal transduction pathway that facilitates transduction of an extracellular signal (e.g. a signal generated by binding of a compound to a membrane-bound molecule) through the cell membrane and into the cell. The target, for example, can be a second intercellular protein that has catalytic activity or a protein that facilitates the association of downstream signaling molecules with a protein of the present invention.

[0460] Determining the ability of the protein to bind to or interact with a target molecule can be accomplished by one of the methods described above for determining direct binding. In one embodiment, determining the ability of the protein to bind to or interact with a target molecule can be accomplished by determining the activity of the target molecule. For example, the activity of the target molecule can be determined by detecting induction of a cellular second messenger of the target (i.e. intracellular Ca²⁺, diacylglycerol, IP3, etc.), detecting catalytic/enzymatic activity of the target an appropriate substrate, detecting the induction of a reporter gene (comprising a regulatory element operatively linked to a nucleic acid encoding a detectable marker, e.g., luciferase), or detecting a cellular response, for example, cell survival, cellular differentiation, or cell proliferation.

[0461] In yet another embodiment, an assay of the present invention is a cell-free assay comprising contacting a protein or biologically active portion thereof with a test compound and determining the ability of the test compound to bind to the protein or biologically active portion thereof. Binding of the test compound to the protein can be determined either directly or indirectly as described above. In one embodiment, the assay comprises contacting the protein or biologically active portion thereof with a known compound which binds a protein of the present invention to form an assay mixture, contacting the assay mixture with a test compound, and determining the ability of the test compound to interact with a protein, wherein determining the ability of the test compound to interact with a protein comprises determining the ability of the test compound to preferentially bind to a protein of the present invention or biologically active portion thereof as compared to the known compound.

[0462] In another embodiment, an assay is a cell-free assay comprising contacting protein or biologically active portion thereof with a test compound and determining the ability of the test compound to modulate (e.g. stimulate or inhibit) the activity of the protein or biologically active portion thereof. Determining the ability of the test compound to modulate the activity of a protein of the present invention can be accomplished, for example, by determining the ability of the protein to bind to a target molecule by one of the methods described above for determining direct binding. In an alternative embodiment, determining the ability of the test compound to modulate the activity of a protein of the present invention can be accomplished by determining the ability of the protein further modulate a target molecule. For example, the catalytic/enzymatic activity of the target molecule on an appropriate substrate can be determined as previously described.

[0463] In yet another embodiment, the cell-free assay comprises contacting the protein or biologically active portion thereof with a known compound which binds a protein of the present invention to form an assay mixture, contacting the assay mixture with a test compound, and determining the ability of the test compound to interact with a protein, wherein determining the ability of the test compound to interact with a protein comprises determining the ability of the protein to preferentially bind to or modulate the activity of a target molecule.

[0464] The cell-free assays of the present invention are amenable to use of either the soluble form or the membrane-bound form of a protein of the present invention. In the case of cell-free assays comprising the membrane-bound form of a protein, it may be desirable to utilize a solubilizing agent such that the membrane-bound form of a protein of the present invention is maintained in solution. Examples of such solubilizing agents include non-ionic detergents such as n-octylglucoside, n-dodecylglucoside, n-dodecylmaltoside, octanoyl-N-methylglucamide, decanoyl-N-methylglucamide, Triton® X100, Triton® X-114, Thesit®, Isotridecypoly (ethylene glycol ether)n, N-dodecyl-N,N-dimethyl-3-ammonio-1-propahe sulfonate, 3-(3-cholamidopropyl)dimethylamminiol-1-propane sulfonate (CHAPS), or 3-(3-cholamidopropyl)dimethylamminiol-2-hydroxy-1-propane sulfonate (CHAPSO).

[0465] In more than one embodiment of the above assay methods of the present invention, it may be desirable to immobilize either a protein of the present invention or its target molecule to facilitate separation of complexed from uncomplexed forms of one or both of the proteins, as well as to accommodate automation of the assay. Binding of a test compound to a protein of the present invention, or interaction of a protein of the present invention with a target molecule in the presence and absence of a candidate compound, can be accomplished in any vessel suitable for containing the reactants. Examples of such vessels include microtiter plates, test tubes, and micro-centrifuge tubes. In one embodiment, a fusion protein can be provided that adds a domain that allows one or both of the proteins to be bound to a matrix. For example, GST-protein of the present invention fusion proteins or GST-target fusion proteins can be adsorbed onto glutathione sepharose beads (Sigma Chemical, St. Louis, Mo.) or glutathione derivatized microtiter plates, that are then combined with the test compound or the test compound and either the non-adsorbed target protein or protein, and the mixture is incubated under conditions conducive to complex formation (e.g., at physiological conditions for salt and pH). Following incubation, the beads or microtiter plate wells are washed to remove any unbound components, the matrix immobilized in the case of beads, complex determined either directly or indirectly, for example, as described above. Alternatively, the complexes can be dissociated from the matrix, and the level of a protein of the present invention binding or activity determined using standard techniques.

[0466] Other techniques for immobilizing proteins on matrices can also be used in the screening assays of the invention. For example, either a protein of the present invention or its target molecule can be immobilized utilizing conjugation of biotin and streptavidin. Biotinylated protein or target molecules can be prepared from biotin-NHS(N-hydroxy-succinimide) using techniques well known in the art (e.g., biotinylation kit, Pierce Chemicals, Rockford, Ill.), and immobilized in the wells of streptavidin-coated 96 well plates (Pierce Chemical). Alternatively, antibodies reactive with a protein of the present invention or target molecules, but which do not interfere with binding of the protein to its target molecule, can be derivatized to the wells of the plate, and unbound target or protein trapped in the wells by antibody conjugation. Methods for detecting such complexes, in addition to those described above for the GST-immobilized complexes, include immunodetection of complexes using antibodies reactive with the protein or target molecule, as well as enzyme-linked assays that rely on detecting an enzymatic activity associated with the protein or target molecule.

[0467] In another embodiment, modulators of a protein of the present invention expression are identified in a method wherein a cell is contacted with a candidate compound and the expression of mRNA or protein in the cell is determined. The level of expression of mRNA or protein in the presence of the candidate compound is compared to the level of expression of mRNA or protein in the absence of the candidate compound. The candidate compound can then be identified as a modulator of a protein of the present invention expression based on this comparison. For example, when expression of mRNA or protein is greater (statistically significantly greater) in the presence of the candidate compound than in its absence, the candidate compound is identified as a stimulator of mRNA or protein expression. Alternatively, when expression of mRNA or protein is less (statistically significantly less) in the presence of the candidate compound than in its absence, the candidate compound is identified as an inhibitor of mRNA or protein expression. The level of mRNA or protein expression in the cells can be determined by methods described herein for detecting mRNA or protein.

[0468] In yet another aspect of the invention, the a protein of the present invention can be used as “bait proteins” in a two-hybrid assay or three hybrid assay (see, e.g., U.S. Pat. No. 5,283,317; Zervos et al. (1993) Cell 72:223-232; Madura et al. (1993) J Biol Chem 268:12046-12054; Bartel et al. (1993) Biotechniques 14:920-924; Iwabuchi et al. (1993) Oncogene 8:1693-1696; and Brent WO94/10300), to identify other proteins that bind to or interact with a protein of the present invention and modulate activity of a protein of the present invention. Such binding proteins are also likely to be involved in the propagation of signals by the proteins as, for example, upstream or downstream elements of the pathway.

[0469] The two-hybrid system is based on the modular nature of most transcription factors, which consist of separable DNA-binding and activation domains. Briefly, the assay utilizes two different DNA constructs. In one construct, the gene that codes for a protein of the present invention is fused to a gene encoding the DNA binding domain of a known transcription factor (e.g., GAL-4). In the other construct, a DNA sequence, from a library of DNA sequences, that encodes an unidentified protein (“prey” or “sample”) is fused to a gene that codes for the activation domain of the known transcription factor. If the “bait” and the “prey” proteins are able to interact, in vivo, forming a protein-dependent complex, the DNA-binding and activation domains of the transcription factor are brought into close proximity. This proximity allows transcription of a reporter gene (e.g., LacZ) that is operably linked to a transcriptional regulatory site responsive to the transcription factor. Expression of the reporter gene can be detected and cell colonies containing the functional transcription factor can be isolated and used to obtain the cloned gene that encodes the protein, which interacts with a protein of the present invention.

[0470] In Vivo Tumor Models

[0471] For cancer, a variety of well-known animal models can be used to further understand the role of the genes identified herein in the development and pathogenesis of tumors, and to test the efficacy of candidate therapeutic agents, including antibodies and other antagonists of the native protein of the present invention, such as small-molecule antagonists. The in vivo nature of such models makes them particularly predictive of responses in human patients. Animal models of tumors and cancers (e.g., breast cancer, colon cancer, prostate cancer, lung cancer, etc.) include both non-recombinant and recombinant (transgenic) animals. Non-recombinant animal models include, for example, rodent, e.g., murine models, Such models can be generated by introducing tumor cells which express the genes of the present invention into syngeneic mice using standard techniques, e.g., subcutaneous injection, tail vein injection, spleen implantation, intraperitoneal implantation, implantation under the renal capsule, or orthotopic implantation, e.g., colon cancer cells implanted in colonic tissue. See, e.g., PCT publication No. WO 97/33551, published Sep. 18, 1997. Probably the most often used animal species in oncological studies are immunodeficient mice and, in particular, nude mice. The observation that the nude mouse with thymic hypo/aplasia could successfully act as a host for human tumor xenografts (which naturally or through recombinant technology express on or more of the genes of the present invention) has lead to its widespread use for this purpose. The autosomal recessive nu gene has been introduced into a very large number of distinct congenic strains of nude mouse, including, for example, ASW, A/He, AKR, BALB/c, B10.LP, C17, C3H, C57BL, C57, CBA, DBA, DDD, I/st, NC, NFR, NFS, NFS/N, NZB, NZC, NZW, P, RIII, and SJL. In addition, a wide variety of other animals with inherited immunological defects other than the nude mouse have been bred and used as recipients of tumor xenografts. For further details see, e.g., The Nude Mouse in Oncology Research, E. Boven and B. Winograd, eds. (CRC Press, Inc., 1991).

[0472] The cells introduced into such animals can be derived from known tumor/cancer cell lines, for example, the B 104-1-1 cell line (stable NIH-3T3 cell line transfected with the neu protooncogene); ras-transfected NIH-3T3 cells; Caco-2 (ATCC HTB-37); or a moderately well-differentiated grade II human colon adenocarcinoma cell line, HT-29 (ATCC HTB-38); or from tumors and cancers. Samples of tumor or cancer cells can be obtained from patients undergoing surgery, using standard conditions involving freezing and storing in liquid nitrogen (Karmali et al., Br. J. Cancer, 48: 689-696 (1983)).

[0473] Tumor cells can be introduced into animals such as nude mice by a variety of procedures. The subcutaneous (s.c.) space in mice is very suitable for tumor implantation. Tumors can be transplanted s.c. as solid blocks, as needle biopsies by use of a trochar, or as cell suspensions. For solid-block or trochar implantation, tumor tissue fragments of suitable size are introduced into the s.c. space. Cell suspensions are freshly prepared from primary tumors or stable tumor cell lines, and injected subcutaneously. Tumor cells can also be injected as subdermal implants. In this location, the inoculum is deposited between the lower part of the dermal connective tissue and the s.c. tissue.

[0474] Animal models of breast cancer can be generated, for example, by implanting rat neuroblastoma cells (from which the neu oncogene was initially isolated), or neu-transformed NIH-3T3 cells into nude mice, essentially as described by Drebin et al., Proc. Nat. Acad. Sci. USA, 83: 9129-9133 (1986).

[0475] Similarly, animal models of colon cancer can be generated by passaging colon cancer cells in animals, e.g., nude mice, leading to the appearance of tumors in these animals. An orthotopic transplant model of human colon cancer in nude mice has been described, for example, by Wang et al., Cancer Research, 54: 4726-4728 (1994) and Too et al., Cancer Research 55: 68i-684 (1995). This model is based on the so-called “METAMOUSE”™ sold by AntiCancer, Inc., (San Diego, Calif.).

[0476] Syngenic Tumor Models

[0477] Tumors that arise in animals can be removed and cultured in vitro. Cells from the in vitro cultures can then be passaged to animals. Such tumors can serve as targets for further testing or drug screening. Alternatively, the tumors resulting from the passage can be isolated and RNA from pre-passage cells and cells isolated after one or more rounds of passage analyzed for differential expression of genes of interest. Such passaging techniques can be performed with any known tumor or cancer cell lines.

[0478] For example, Meth A, CMS4, CMS5, and WEHI-164 are chemically induced fibrosarcomas of BALB/c female mice (DeLeo et al., J. Exp. Med., 146: 720 (1977)), which provide a highly controllable model system for studying the anti-tumor activities of various agents (Palladino et al., J. Immunol., 138: 4023-4032 (1987)). Briefly, tumor cells are propagated in vitro in cell culture. Prior to injection into the animals, the cell lines are washed and suspended in buffer, at a cell density of about 10×10⁶ to 10×10⁷ cells/ml. The animals are then infected subcutaneously with 10 to 100 μl of the cell suspension, allowing one to three weeks for a tumor to appear.

[0479] In addition, the Lewis lung (3LL) carcinoma of mice, which is one of the most thoroughly studied experimental tumors, can be used as an investigational tumor model. Efficacy in this tumor model has been correlated with beneficial effects in the treatment of human patients diagnosed with small-cell carcinoma of the lung (SCCL). This tumor can be introduced in normal mice upon injection of tumor fragments from an affected mouse or of cells maintained in culture (Zupi et al., Br. J. Cancer, 41: suppl. 4, 30 (1980)). Evidence indicates that tumors can be started from injection of even a single cell and that a very high proportion of infected tumor cells survive. For further information about this tumor model see, Zacharski, Haemostasis, 16: 300-320 (1986).

[0480] One way of evaluating the efficacy of a test compound in an animal model with an implanted tumor is to measure the size of the tumor before and after treatment. Traditionally, the size of implanted tumors has been measured with a slide caliper in two or three dimensions. The measure limited to two dimensions does not accurately reflect the size of the tumor; therefore, it is usually converted into the corresponding volume by using a mathematical formula. However, the measurement of tumor size is very inaccurate. The therapeutic effects of a drug candidate can be better described as treatment-induced growth delay and specific growth delay. Another important variable in the description of tumor growth is the tumor volume doubling time. Computer programs for the calculation and description of tumor growth are also available, such as the program reported by Rygaard and Spang-Thomsen, Proc. 6th Int. Workshop on Immune-Deficient Animals Wu and Sheng eds. (Basel, 1989), p. 301. It is noted, however, that necrosis and inflammatory responses following treatment may actually result in an increase in tumor size, at least initially. Therefore, these changes need to be carefully monitored, by a combination of a morphometric method and flow cytometric analysis.

[0481] Further, recombinant (transgenic) animal models can be engineered by introducing the coding portion of the genes identified herein into the genome of animals of interest, using standard techniques for producing transgenic animals. Animals that can serve as a target for transgenic manipulation include, without limitation, mice, rats, rabbits, guinea pigs, sheep, goats, pigs, and non-human primates, e.g., baboons, chimpanzees, and monkeys. Techniques known in the art to introduce a transgene into such animals include pronucleic microinjection (U.S. Pat. No. 4,873,191); retrovirus-mediated gene transfer into germ lines (e.g., Van der Putten et al., Proc. Natl. Acad. Sci. USA, 82: 6148-615 (1985)); gene targeting in embryonic stem cells (Thompson et al., Cell, 56: 313-321 (1989)); electroporation of embryos (Lo, Mol. Cell. Biol., 3: 1803-1814 (1983)); and sperm-mediated gene transfer (Lavitrano et al., Cell, 57: 717-73 (1989)). For a review, see for example, U.S. Pat. No. 4,736,866.

[0482] For the purpose of the present invention, transgenic animals include those that carry the transgene only in part of their cells (“mosaic animals”). The transgene can be integrated either as a single transgene, or in concatamers, e.g., head-to-head or head-to-tail tandems. Selective introduction of a transgene into a particular cell type is also possible by following, for example, the technique of Lasko et al., Proc. Natl. Acad. Sci. USA, 89: 6232-636 (1992).

[0483] The expression of the transgene in transgenic animals can be monitored by standard techniques. For example, Southern blot analysis or PCR amplification can be used to verify the integration of the transgene. The level of mRNA expression can then be analyzed using techniques such as in situ hybridization, Northern blot analysis, PCR, or immunocytochemistry. The animals are further examined for signs of tumor or cancer development.

[0484] Alternatively, “knock-out” animals can be constructed that have a defective or altered gene encoding a polypeptide identified herein, as a result of homologous recombination between the endogenous gene encoding the polypeptide and altered genomic DNA encoding the same polypeptide introduced into an embryonic cell of the animal. For example, cDNA encoding a particular polypeptide can be used to clone genomic DNA encoding that polypeptide in accordance with established techniques. A portion of the genomic DNA encoding a particular polypeptide can be deleted or replaced with another gene, such as a gene encoding a selectable marker that can be used to monitor integration. Typically, several kilobases of unaltered flanking DNA (both at the 5′ and 3′ ends) are included in the vector. See, e.g., Thomas and Capecchi, Cell, 51: 503 (1987) for a description of homologous recombination vectors. The vector is introduced into an embryonic stem cell line (e.g., by electroporation) and cells in which the introduced DNA has homologously recombined with the endogenous DNA are selected. See, e.g., Li et al., Cell, 69: 915 (1992). The selected cells are then injected into a blastocyst of an animal (e.g., a mouse or rat) to form aggregation chimeras. See, e.g., Bradley, in Teratocarcinomas and Embryonic Stem Cells: A Practical Approach, E. J. Robertson, ed. (IRL: Oxford, 1987), pp. 113-152. A chimeric embryo can then be implanted into a suitable pseudopregnant female foster animal and the embryo brought to term to create a “knock-out” animal. Progeny harboring the homologously recombined DNA in their germ cells can be identified by standard techniques and used to breed animals in which all cells of the animal contain the homologously recombined DNA. Knock-out animals can also be generated, as is well known in the art, by administering an antisense molecule of the invention. Animals comprising such antisense molecules are specifically contemplated as an embodiment of the invention. Knockout animals can be characterized, for instance, by their ability to defend against certain pathological conditions and by their development of pathological conditions due to absence (knock-out) of the polypeptides.

[0485] Animal Models (Non-Rodent)

[0486] The efficacy of antibodies specifically binding a protein of the present invention polypeptides identified herein, and other drug candidates, can be tested also in the treatment of spontaneous animal tumors. A suitable target for such studies is the feline oral squamous cell carcinoma (SCC). Feline oral SCC is a highly invasive, malignant tumor that is the most common oral malignancy of cats, accounting for over 60% of the oral tumors reported in this species. It rarely metastasizes to distant sites, although this low incidence of metastasis may merely be a reflection of the short survival times for cats with this tumor. These tumors are usually not amenable to surgery, primarily because of the anatomy of the feline oral cavity. At present, there is no effective treatment for this tumor. Prior to entry into the study, each cat undergoes complete clinical examination and biopsy, and is scanned by computed tomography (CT). Cats diagnosed with sublingual oral squamous cell tumors are excluded from the study. The tongue can become paralyzed as a result of such tumor, and even if the treatment kills the tumor, the animals may not be able to feed themselves. Each cat is treated repeatedly, over a longer period of time. Photographs of the tumors will be taken daily during the treatment period, and at each subsequent recheck. After treatment, each cat undergoes another CT scan. CT scans and thoracic radiograms are evaluated every 8 weeks thereafter. The data are evaluated for differences in survival, response, and toxicity as compared to control groups. Positive response may require evidence of tumor regression, preferably with improvement of quality of life and/or increased life span.

[0487] In addition, other spontaneous animal tumors, such as fibrosarcoma, adenocarcinoma, lymphoma, chondroma, or leiomyosarcoma of dogs, cats, and baboons can also be tested. Of these, mammary adenocarcinoma in dogs and cats is a preferred model as its appearance and behavior are very similar to those in humans. However, the use of this model is limited by the rare occurrence of this type of tumor in animals.

[0488] Other in vitro and in vivo cancer tests known in the art are also suitable herein.

[0489] Screening for Agonists or Antagonists

[0490] This invention encompasses methods of screening compounds to identify those that mimic the polypeptide (agonists) or prevent the effect of the polypeptide (antagonists).

[0491] Screening assays for antagonist drug candidates are designed to identify compounds that bind or complex with the polypeptides encoded by the genes identified herein, or otherwise interfere with the interaction of the encoded polypeptides with other cellular proteins. Such assays include methods identifying compounds that interfere with the interaction of a gene (mRNA or genomic DNA) encoding a polypeptide, such as those described herein. These screening assays will include assays amenable to high- or ultra-high-throughput screening of chemical libraries, making them particularly suitable for identifying antisense and small molecule drug candidates.

[0492] The assays can be performed in a variety of formats, including protein-protein binding assays, biochemical screening assays, immunoassays, target nucleic acid binding assays, and cell-based assays, which are well characterized in the art.

[0493] Antisense

[0494] Another potential polypeptide antagonist is an antisense construct prepared using antisense technology, where, for example, the antisense molecule acts to block directly the translation of mRNA (or transcription) by hybridizing to targeted mRNA (or genomic DNA) and preventing protein translation (or mRNA transcription) of a protein of the present invention. Antisense technology can be used to control gene expression through triple-helix formation or antisense DNA or RNA, both of which methods are based on binding of a polynucleotide to DNA or RNA. For example, the 5′ coding portion of the polynucleotide sequence, which encodes the mature polypeptides herein, is used to design an antisense RNA oligonucleotide of from about 10 to 40 base pairs in length. A DNA oligonucleotide is designed to be complementary to a region of the gene involved in transcription (triple helix—see Lee et al., Nucl. Acids Res., 6:3073 (1979); Cooney et al., Science, 241: 456 (1988); Dervan et al., Science, 251:1360 (1991)), thereby preventing transcription and the production of the polypeptide. The antisense RNA oligonucleotide hybridizes to the mRNA in vivo and blocks translation of the mRNA molecule into the polypeptide (antisense—Okano, Neurochem., 56:560 (1991); Oligodeoxynucleotides as Antisense Inhibitors of Gene Expression (CRC Press: Boca Raton, Fla., 1988). The oligonucleotides described above can also be delivered to cells such that the antisense RNA or DNA can be expressed in vivo to inhibit production of the polypeptide. When antisense DNA is used, oligodeoxyribonucleotides derived from the translation initiation site, e.g., between about −10 and +10 positions of the target gene nucleotide sequence, are preferred.

[0495] Antisense RNA or DNA molecules are generally at least about 5 bases in length, about 10 bases in length, about 15 bases in length, about 20 bases in length, about 25 bases in length, about 30 bases in length, about 35 bases in length, about 40 bases in length, about 45 bases in length, about 50 bases in length, about 55 bases in length, about 60 bases in length, about 65 bases in length, about 70 bases in length, about 75 bases in length, about 80 bases in length, about 85 bases in length, about 90 bases in length, about 95 bases in length, about 100 bases in length, or more.

[0496] The present invention employs oligomeric antisense compounds, particularly oligonucleotides, for use in modulating the function of nucleic acid molecules including SEQ ID NOs:1-11, SEQ ID NOs:13-38, and SEQ ID NO:3113 encoding SEQ ID NOs:39-49, SEQ ID NOs:51-76, and SEQ ID NO: 3114, ultimately modulating the amount of SEQ ID NOs:39-49, SEQ ID NOs:51-76, and SEQ ID NO: 3114 produced. This is accomplished by providing antisense compounds, which specifically hybridize with one or more nucleic acids including SEQ ID NOs:1-11, SEQ ID NOs:13-38, and SEQ ID NO:3113 encoding SEQ ID NOs:39-49, SEQ ID NOs:51-76, and SEQ ID NO: 3114. As used herein, the terms “target nucleic acid” and “nucleic acid including SEQ ID NOs:1-11, SEQ ID NOs:13-38, and SEQ ID NO:3113 encoding SEQ ID NOs:39-49, SEQ ID NOs:51-76, and SEQ ID NO: 3114 encompass DNA encoding SEQ ID NOs:39-49, SEQ ID NOs:51-76, and SEQ ID NO: 3114, RNA (including pre-mRNA and mRNA) transcribed from such DNA, and also cDNA derived from such RNA. The specific hybridization of an oligomeric compound with its target nucleic acid interferes with the normal function of the nucleic acid. This modulation of function of a target nucleic acid by compounds, which specifically hybridize to it, is generally referred to as “antisense”. The functions of DNA to be interfered with include replication and transcription. The functions of RNA to be interfered with include all vital functions such as, for example, translocation of the RNA to the site of protein translation, translation of protein from the RNA, splicing of the RNA to yield one or more mRNA species, and catalytic activity which may be engaged in or facilitated by the RNA. The overall effect of such interference with target nucleic acid function is modulation of the expression of SEQ ID NOs:39-49, SEQ ID NOs:51-76, and SEQ ID NO: 3114. In the context of the present invention, “modulation” means either an increase (stimulation) or a decrease (inhibition) in the expression of a gene. In the context of the present invention, inhibition is the preferred form of modulation, of gene expression and mRNA is a preferred target.

[0497] It is preferred to target specific nucleic acids for antisense. “Targeting” an antisense compound to a particular nucleic acid, in the context of this invention, is a multistep process. The process usually begins with the identification of a nucleic acid sequence whose function is to be modulated. This may be, for example, a cellular gene (or mRNA transcribed from the gene) whose expression is associated with a particular disorder or disease state, or a nucleic acid molecule from an infectious agent. In the present invention, the target is a nucleic acid molecule including SEQ ID NOs:1-11, SEQ ID NOs:13-38, and SEQ ID NO:3113 encoding SEQ ID NOs:39-49, SEQ ID NOs:51-76, and SEQ ID NO: 3114. The targeting process also includes determination of a site or sites within this gene for the antisense interaction to occur such that the desired effect, e.g., detection or modulation of expression of the protein, will result. Within the context of the present invention, a preferred intragenic site is the region encompassing the translation initiation or termination codon of the open reading frame (ORF) of the gene. Since, as is known in the art, the translation initiation codon is typically 5′-AUG (in transcribed mRNA molecules; 5′-ATG in the corresponding DNA molecule), the translation initiation codon is also referred to as the “AUG codon,” the “start codon” or the “AUG start codon”. A minority of genes have a translation initiation codon having the RNA sequence 5′-GUG, 5′-UUG or 5′-CUG, and 5′-AUA, 5′-ACG and 5′-CUG have been shown to function in vivo. Thus, the terms “translation initiation codon” and “start codon” can encompass many codon sequences, even though the initiator amino acid in each instance is typically methionine (in eukaryotes) or formylmethionine (in prokaryotes). It is also known in the art that eukaryotic and prokaryotic genes may have two or more alternative start codons, any one of which may be preferentially utilized for translation initiation in a particular cell type or tissue, or under a particular set of conditions. In the context of the invention, “start codon” and “translation initiation codon” refer to the codon or codons that are used in vivo to initiate translation of an mRNA molecule transcribed from a gene encoding SEQ ID NOs:39-49, SEQ ID NOs:51-76, and SEQ ID NO: 3114, regardless of the sequence(s) of such codons.

[0498] It is also known in the art that a translation termination codon (or “stop codon”) of a gene may have one of three sequences, i.e. 5′-UAA, 5′-UAG and 5′-UGA (the corresponding DNA sequences are 5′-TAA, 5′-TAG and 5′-TGA, respectively). The terms “start codon region” and “translation initiation codon region” refer to a portion of such an mRNA or gene that encompasses from about 25 to about 50 contiguous nucleotides in either direction (i.e., 5′ or 3′) from a translation initiation codon. Similarly, the terms “stop codon region” and “translation termination codon region” refer to a portion of such an mRNA or gene that encompasses from about 25 to about 50 contiguous nucleotides in either direction (i.e., 5′ or 3′) from a translation termination codon.

[0499] The open reading frame (ORF) or “coding region,” which is known in the art to refer to the region between the translation initiation codon and the translation termination codon, is also a region which may be targeted effectively. Other target regions include the 5′ untranslated region (5′UTR), known in the art to refer to the portion of an mRNA in the 5′ direction from the translation initiation codon, and thus including nucleotides between the 5′ cap site and the translation initiation codon of an mRNA or corresponding nucleotides on the gene, and the 3′ untranslated region (3′UTR), known in the art to refer to the portion of an mRNA in the 3′ direction from the translation termination codon, and thus including nucleotides between the translation termination codon and 3′ end of an mRNA or corresponding nucleotides on the gene. The 5′ cap of an mRNA comprises an N7-methylated guanosine residue joined to the 5′-most residue of the mRNA via a 5′-5′ triphosphate linkage. The 5′ cap region of an mRNA is considered to include the 5′ cap structure itself as well as the first 50 nucleotides adjacent to the cap. The 5′ cap region may also be a preferred target region.

[0500] Although some eukaryotic mRNA transcripts are directly translated, many contain one or more regions, known as “introns,” which are excised from a transcript before it is translated. The remaining (and therefore translated) regions are known as “exons” and are spliced together to form a continuous mRNA sequence. mRNA splice sites, i.e., intron-exon junctions, may also be preferred target regions, and are particularly useful in situations where aberrant splicing is implicated in disease, or where an overproduction of a particular mRNA splice product is implicated in disease. Aberrant fusion junctions due to rearrangements or deletions are also preferred targets. It has also been found that introns can also be effective, and therefore preferred, target regions for antisense compounds targeted, for example, to DNA or pre-mRNA.

[0501] Once one or more target sites have been identified, oligonucleotides are chosen which are sufficiently complementary to the target, i.e., hybridize sufficiently well and with sufficient specificity, to give the desired effect.

[0502] In the context of this invention, “hybridization” means hydrogen bonding, which may be Watson-Crick, Hoogsteen, or reversed Hoogsteen hydrogen bonding, between complementary nucleoside or nucleotide bases. For example, adenine and thymine are complementary nucleobases, which pair through the formation of hydrogen bonds. “Complementary,” as used herein, refers to the capacity for precise pairing between two nucleotides. For example, if a nucleotide at a certain position of an oligonucleotide is capable of hydrogen bonding with a nucleotide at the same position of a DNA or RNA molecule, then the oligonucleotide and the DNA or RNA are considered to be complementary to each other at that position. The oligonucleotide and the DNA or RNA are complementary to each other when a sufficient number of corresponding positions in each molecule are occupied by nucleotides which can hydrogen bond with each other. Thus, “specifically hybridizable” and “complementary” are terms which are used to indicate a sufficient degree of complementarity or precise pairing such that stable and specific binding occurs between the oligonucleotide and the DNA or RNA target. It is understood in the art that the sequence of an antisense compound need not be 100% complementary to that of its target nucleic acid to be specifically hybridizable. An antisense compound is specifically hybridizable when binding of the compound to the target DNA or RNA molecule interferes with the normal function of the target DNA or RNA to cause a loss of utility, and there is a sufficient degree of complementarity to avoid non-specific binding of the antisense compound to non-target sequences under conditions in which specific binding is desired, i.e., under physiological conditions in the case of in vivo assays or therapeutic treatment, and in the case of in vitro assays, under conditions in which the assays are performed.

[0503] Antisense compounds are commonly used as research reagents and diagnostics. For example, antisense oligonucleotides, which are able to inhibit gene expression with exquisite specificity, are often used by those of ordinary skill to elucidate the function of particular genes. Antisense compounds are also used, for example, to distinguish between functions of various members of a biological pathway. Antisense modulation has, therefore, been harnessed for research use.

[0504] The specificity and sensitivity of antisense is also harnessed by those of skill in the art for therapeutic uses. Antisense oligonucleotides have been employed as therapeutic moieties in the treatment of disease states in animals and man. Antisense oligonucleotides have been safely and effectively administered to humans and numerous clinical trials are presently underway. It is thus established that oligonucleotides can be useful therapeutic modalities that can be configured to be useful in treatment regimes for treatment of cells, tissues and animals, especially humans. In the context of this invention, the term “oligonucleotide” refers to an oligomer or polymer of ribonucleic acid (RNA) or deoxyribonucleic acid (DNA) or mimetics thereof. This term includes oligonucleotides composed of naturally occurring nucleobases, sugars and covalent internucleoside (backbone) linkages as well as oligonucleotides having non-naturally occurring portions which function similarly. Such modified or substituted oligonucleotides are often preferred over native forms because of desirable properties such as, for example, enhanced cellular uptake, enhanced affinity for nucleic acid target and increased stability in the presence of nucleases.

[0505] While antisense oligonucleotides are a preferred form of antisense compound, the present invention comprehends other oligomeric antisense compounds, including but not limited to oligonucleotide mimetics such as are described below. The antisense compounds in accordance with this invention preferably comprise from about 8 to about 30 nucleobases (i.e. from about 8 to about 30 linked nucleo sides). Particularly preferred antisense compounds are antisense oligonucleotides, even more preferably those comprising from about 12 to about 25 nucleobases. As is known in the art, a nucleoside is a base-sugar combination. The base portion of the nucleoside is normally a heterocyclic base. The two most common classes of such heterocyclic bases are the purines and the pyrimidines. Nucleotides are nucleosides that further include a phosphate group covalently linked to the sugar portion of the nucleoside. For those nucleosides that include a pentofuranosyl sugar, the phosphate group can be linked to either the 2′, 3′ or 5′ hydroxyl moiety of the sugar. In forming oligonucleotides, the phosphate groups covalently link adjacent nucleosides to one another to form a linear polymeric compound. In turn the respective ends of this linear polymeric structure can be further joined to form a circular structure, however, open linear structures are generally preferred. Within the oligonucleotide structure, the phosphate groups are commonly referred to as forming the internucleoside backbone of the oligonucleotide. The normal I linkage or backbone of RNA and DNA is a 3′ to 5′ phosphodiester linkage.

[0506] Specific examples of preferred antisense compounds useful in this invention include oligonucleotides containing modified backbones or non-natural internucleoside linkages. As defined in this specification, oligonucleotides having modified backbones include those that retain a phosphorus atom in the backbone and those that do not have a phosphorus atom in the backbone. For the purposes of this specification, and as sometimes referenced in the art, modified oligonucleotides that do not have a phosphorus atom in their internucleoside backbone can also be considered to be oligonucleosides.

[0507] Preferred modified oligonucleotide backbones include, for example, phosphorothioates, chiral phosphorothioates, phosphorodithioates, phosphotriesters, aminoalkylphosphotriesters, methyl and other alkyl phosphonates including 3′alkylene phosphonates and chiral phosphonates, phosphinates, phosphoramidates including 3′-amino phosphoramidate and aminoalkylphosphoramidates, thionophosphoramidates, thionoalkylphosphonates, thionoalkylphosphotriesters, and boranophosphates having normal 3′-5′ linkages, 2′-5′ linked analogs of these, and those having inverted polarity wherein the adjacent pairs of nucleoside units are linked 3′-5′ to 5′-3′ or 2′-5′ to 5′-2′. Various salts, mixed salts and free acid forms are also included.

[0508] Representative United States patents that teach the preparation of the above phosphorus-containing linkages include, but are not limited to, U.S. Pat. Nos. 3,687,808; 4,469,863; 4,476,301; 5,023,243; 5,177,196; 5,188,897; 5,264,423; 5,276,019; 5,278,302; 5,286,717; 5,321,131; 5,399,676; 5,405,939; 5,453,496; 5,455,233; 5,466,677; 5,476,925; 5,519,126; 5,536,821; 5;541,306; 5,550,111; 5,563,253; 5,571,799; 5,587,361; and 5,625,050, each of which is herein incorporated by reference.

[0509] Preferred modified oligonucleotide backbones that do not include a phosphorus atom therein have backbones that are formed by short chain alkyl or cycloalkyl internucleoside linkages, mixed heteroatom and alkyl or cycloalkyl internucleoside linkages, or one or more short chain heteroatomic or heterocyclic internucleoside linkages. These include those having morpholino linkages (formed in part from the sugar portion of a nucleoside); siloxane backbones; sulfide, sulfoxide and sulfone backbones; formacetyl and thioformacetyl backbones; methylene formacetyl and thioformacetyl backbones; alkene containing backbones; sulfamate backbones; methyleneimino and methylenehydrazino backbones; sulfonate and sulfonamide backbones; amide backbones; and others having mixed N, O, S and CH₂ component parts.

[0510] Representative United States patents that teach the preparation of the above oligonucleosides include, but are not limited to, U.S. Pat. Nos. 5,034,506; 5,166,315; 5,185,444; 5,214,134; 5,216,141; 5,235,033; 5,264,562; 5,264,564; 5,405,938; 5,434,257; 5,466,677; 5,470,967; 5,489,677; 5,541,307; 5,561,225; 5,596,086; 5,602,240; 5,610,289; 5,602,240; 5,608,046; 5,610,289; 5,618,704; 5,623,070; 5,663,312; 5,633,360; 5,677,437; and 5,677,439, each of which is herein incorporated by reference.

[0511] In other preferred oligonucleotide mimetics, both the sugar and the internucleoside linkage, i.e., the backbone, of the nucleotide units are replaced with novel groups. The base units are maintained for hybridization with an appropriate nucleic acid target compound. One such oligomeric compound, an oligonucleotide mimetic that has been shown to have excellent hybridization properties, is referred to as a peptide nucleic acid (PNA). In PNA compounds, the sugar-backbone of an oligonucleotide is replaced with an amide containing backbone, in particular an aminoethylglycine backbone. The nucleobases are retained and are bound directly or indirectly to aza nitrogen atoms of the amide portion of the backbone. Representative United States patents that teach the preparation of PNA compounds include, but are not limited to, U.S. Pat. Nos. 5,539,082; 5,714,331; and 5,719,262, each of which is herein incorporated by reference. Further teaching of PNA compounds can be found in Nielsen et al., Science, 1991, 254, 1497-1500.

[0512] Most preferred embodiments of the invention are oligonucleotides with phosphorothioate backbones and oligonucleosides with heteroatom backbones, and in particular —CH₂—NH—O—CH₂—, —CH₂—N(CH₃)—O—CH₂— [known as a methylene (methylimino) or MMI backbone], —CH₂—O—N(CH₃)—CH₂—, —CH₂N(CH₃)—N(CH₃)—CH₂— and —O—N(CH₃)—CH₂—CH₂— [wherein the native phosphodiester backbone is represented as —O—P—O—CH₂—] of the above referenced U.S. Pat. No. 5,489,677, and the amide backbones of the above referenced U.S. Pat. No. 5,602,240. Also preferred are oligonucleotides having morpholino backbone structures of the above-referenced U.S. Pat. No. 5,034,506.

[0513] Modified oligonucleotides may also contain one or more substituted sugar moieties. Preferred oligonucleotides comprise one of the following at the 2′ position: OH; F; O-, S-, or N-alkyl; O-, S-, or N-alkenyl; O-, S- or N-alkynyl; or O-alkyl-O-alkyl, wherein the alkyl, alkenyl and alkynyl may be substituted or unsubstituted C, to C₁₀ alkyl or C₂ to C₁₀ alkenyl and alkynyl. Particularly preferred are O[(CH₂)ₙO]ₘCH₃, O(CH₂)ₙ,OCH₃, O(CH₂)ₙNH₂, O(CH₂)ₙCH₃, O(CH₂)ₙONH₂, and O(CH₂ₙON[(CH₂)ₙCH₃)]₂ where n and m are from 1 to about 10. Other preferred oligonucleotides comprise one of the following at the 2′ position: C₁ to C₁₀, (lower alkyl, substituted lower alkyl, alkaryl, aralkyl, O-alkaryl or O-aralkyl, SH, SCH₃, OCN, Cl, Br, CN, CF₃, OCF₃, SOCH₃, SO₂CH₃, ONO₂, NO₂, N₃, NH₂, heterocycloalkyl, heterocycloalkaryl, aminoalkyl amino, polyalkyl amino, substituted silyl, an RNA cleaving group, a reporter group, an intercalator, a group for improving the pharmacokinetic properties of an oligonucleotide, or a group for improving the pharmacodynamic properties of an oligonucleotide, and other substituents having similar properties. A preferred modification includes 2′-methoxyethoxy (2′-O—CH₂CH₂OCH₃, also known as 2′-O-(2-methoxyethyl) or 2′-MOE) (Martin et al., Helv. Chim. Acta, 1995, 78, 486-504) i.e., an alkoxyalkoxy group. A further preferred modification includes 2′-dimethylaminooxyethoxy, i.e., a O(CH₂)₂ON(CH₃)₂ group, also known as 2′-DMAOE, as described in examples herein below, and 2′-dimethylaminoethoxyethoxy (also known in the art as 2′-O-dimethylaminoethoxyethyl or 2′-DMAEOE), i.e., 2′-O—CH₂—O—CH₂—N(CH₂)₂, also described in examples herein below.

[0514] Other preferred modifications include 2′-methoxy (2′-O CH₃), 2′-aminopropoxy (2′-O CH₂ CH₂ CH₂NH₂) and 2′-fluoro (2′-F). Similar modifications may also be made at other positions on the oligonucleotide, particularly the 3′ position of the sugar on the 3′ terminal nucleotide or in 2′-5′ linked oligonucleotides and the 5′ position of 5′ terminal nucleotide. Oligonucleotides may also have sugar mimetics such as cyclobutyl moieties in place of the pentofuranosyl sugar. Representative United States patents that teach the preparation of such modified sugar structures include, but are not limited to, U.S. Pat. Nos. 4,981,957; 5,118,800; 5,319,080; 5,359,044; 5,393,878; 5,446,137; 5,466,786; 5,514,785; 5,519,134; 5,567,811; 5,576,427; 5,591,722; 5,597,909; 5,610,300; 5,627,053; 5,639,873; 5,646,265; 5,658,873; 5,670,633; and 5,700,920, each of which is herein incorporated by reference in its entirety.

[0515] Oligonucleotides may also include nucleobase (often referred to in the art simply as “base”) modifications or substitutions. As used herein, “unmodified” or “natural” nucleobases include the purine bases adenine (A) and guanine (G), and the pyrimidine bases thymine (T), cytosine (C) and uracil (U). Modified nucleobases include other synthetic and natural nucleobases such as 5-methylcytosine (5-me-C), 5-hydroxymethyl cytosine, xanthine, hypoxanthine, 2-aminoadenine, 6-methyl and other alkyl derivatives of adenine and guanine, 2-propyl and other alkyl derivatives of adenine and guanine, 2-thiouracil, 2-thiothymine and 2-thiocytosine, 5-halouracil and cytosine, 5-propynyl uracil and cytosine, 6-azo uracil, cytosine and thymine, 5-uracil (pseudouracil), 4-thiouracil, 8-halo, 8-amino, 8-thiol, 8-thioalkyl, 8-hydroxyl and other 8-substituted adenines and guanines, 5-halo particularly 5-bromo, 5-trifluoromethyl and other 5-substituted uracils and cytosines, 7-methylquanine and 7-methyladenine, 8-azaguanine and 8-azaadenine, 7-deazaguanine and 7-deazaadenine and 3-deazaguanine and 3-deazaadenine. Further nucleobases include those disclosed in U.S. Pat. No. 3,687,808, those disclosed in The Concise Encyclopedia Of Polymer Science And Engineering, pages 858-859, Kroschwitz, J. I., ed. John Wiley & Sons, 1990, those disclosed by Englisch et al., Angewandte Chemie, International Edition, 1991, 30, 613, and those disclosed by Sanghvi, Y. S., Chapter 15, Antisense Research and Applications, pages 289-302, Crooke, S. T. and Lebleu, B. ed., CRC Press, 1993. Certain of these nucleobases are particularly useful for increasing the binding affinity of the oligomeric compounds of the invention. These include 5-substituted pyrimidines, 6-azapyrimidines and N-2, N-6 and O-6 substituted purines, including 2-aminopropyladenine, 5-propynyluracil and 5-propynylcytosine. 5-methylcytosine substitutions have been shown to increase nucleic acid duplex stability by 0.6-1.2° C. (Sanghvi, Y. S., Crooke, S. T. and Lebleu, B., eds, Antisense Research and Applications, CRC Press, Boca Raton, 1993, pp. 276-278) and are presently preferred base substitutions, even more particularly when combined with 2′-O-methoxyethyl sugar modifications.

[0516] Representative United States patents that teach the preparation of certain of the above noted modified nucleobases as well as other modified nucleobases include, but are not limited to, the above noted U.S. Pat. No. 3,687,808, as well as U.S. Pat. Nos. 4,845,205; 5,130,302; 5,134,066; 5,175,273; 5,367,066; 5,432,272; 5,457,187; 5,459,255; 5,484,908; 5,502,177; 5,525,711; 5,552,540; 5,587,469; 5,594,12′, 5,596,091; 5,614,617; 5,750,692, and 5,681,941, each of which is herein incorporated by reference.

[0517] Another modification of the oligonucleotides of the invention involves chemically linking to the oligonucleotide one or more moieties or conjugates, which enhance the activity, cellular distribution, or cellular uptake of the oligonucleotide. Such moieties include but are not limited to lipid moieties such as a cholesterol moiety (Letsinger et al., Proc. Natl. Acad. Sci. USA, 1989, 86, 6553-6556), cholic acid (Manoharan et al., Bioorg. Med. Chem. Let., 1994, 4, 1053-1060), a thioether, e.g., hexyl-S-tritylthiol (Manoharan et al., Ann. N.Y. Acad. Sci., 1992, 660, 306-309; Manoharan et al., Bioorg. Med. Chem. Let., 1993, 3, 2765-2770), a thiocholesterol (Oberhauser et al., Nucl. Acids Res., 1992, 20, 533-538), an aliphatic chain, e.g., dodecandiol or undecyl residues (Saison-Behmoaras et al., EMBO J., 1991, 10, 1111-1118; Kabanov et al., FEBS Lett., 1990, 259, 327-330; Svinarchuk et al., Biochimie, 1993, 75, 49-54), a phospholipid, e.g., di-hexadecyl-rac-glycerol or triethylammonium 1,2-di-O-hexadecyl-rac-glycero-3-H-phosphonate (Manoharan et al., Tetrahedron Lett., 1995, 36, 3651-3654; Shea et al., Nucl. Acids Res., 1990, 18, 3777-3783), a polyamine or a polyethylene glycol chain (Mancharan et al., Nucleosides & Nucleotides, 1995, 14, 969-973), or adamantane acetic acid (Manoharan et al., Tetrahedron Lett., 1995, 36, 3651-3654), a palmityl moiety (Mishra et al., Biochim. Biophys. Acta, 1995, 1264, 229-237), or an octadecylamine or hexylamino-carbonyl-oxycholesterol moiety (Crooke et al., J. Pharmacol. Exp. Ther., 1996, 277, 923-937).

[0518] Representative United States patents that teach the preparation of such oligonucleotide conjugates include, but are not limited to, U.S. Pat. Nos. 4,828,979; 4,948,882; 5,218,105; 5,525,465; 5,541,313; 5,545,730; 5,552,538; 5,578,717, 5,580,731; 5,580,731; 5,591,584; 5,109,124; 5,118,802; 5,138,045; 5,414,077; 5,486,603; 5,512,439; 5,578,718; 5,608,046; 4,587,044; 4,605,735; 4,667,025; 4,762,779; 4,789,737; 4,824,941; 4,835,263; 4,876,335; 4,904,582; 4,958,013; 5,082,830; 5,112,963; 5,214,136; 5,082,830; 5,112,963; 5,214,136; 5,245,022; 5,254,469; 5,258,506; 5,262,536; 5,272,250; 5,292,873; 5,317,098; 5,371,241, 5,391,723; 5,416,203, 5,451,463; 5,510,475; 5,512,667; 5,514,785; 5,565,552; 5,567,810; 5,574,142; 5,585,481; 5,587,371; 5,595,726; 5,597,696; 5,599,923; 5,599,928 and 5,688,941, each of which is herein incorporated by reference.

[0519] It is not necessary for all positions in a given compound to be uniformly modified, and in fact more than one of the aforementioned modifications may be incorporated in a single compound or even at a single nucleoside within an oligonucleotide. The present invention also includes antisense compounds, which are chimeric compounds. “Chimeric” antisense compounds or “chimeras,” in the context of this invention, are antisense compounds, particularly oligonucleotides, which contain two or more chemically distinct regions, each made up of at least one monomer unit, i.e., a nucleotide in the case of an oligonucleotide compound. These oligonucleotides typically contain at least one region wherein the oligonucleotide is modified so as to confer upon the oligonucleotide increased resistance to nuclease degradation, increased cellular uptake, and/or increased binding affinity for the target nucleic acid. An additional region of the oligonucleotide may serve as a substrate for enzymes capable of cleaving RNA:DNA or RNA:RNA hybrids. By way of example, RNase H is a cellular endonuclease, which cleaves the RNA strand of RNA:DNA duplex. Activation of RNase H, therefore, results in cleavage of the RNA target, thereby greatly enhancing the efficiency of oligonucleotide inhibition of gene expression. Consequently, comparable results can often be obtained with shorter oligonucleotides when chimeric oligonucleotides are used, compared to phosphorothioate deoxyoligonucleotides hybridizing to the same target region. Cleavage of the RNA target can be routinely detected by gel electrophoresis and, if necessary, associated nucleic acid hybridization techniques known in the art.

[0520] Chimeric antisense compounds of the invention may be formed as composite structures of two or more oligonucleotides, modified oligonucleotides, oligonucleosides and/or oligonucleotide mimetics as described above. Such compounds have also been referred to in the art as hybrids or gapmers. Representative United States patents that teach the preparation of such hybrid structures include, but are not limited to, U.S. Pat. Nos. 5,013,830; 5,149,797; 5,220,007; 5,256,775; 5,366,878; 5,403,711; 5,491,133; 5,565,350; 5,623,065; 5,652,355; 5,652,356; and 5,700,922, each of which is herein incorporated by reference in its entirety.

[0521] The antisense compounds used in accordance with this invention may be conveniently, and routinely made through the well-known technique of solid phase synthesis. Equipment for such synthesis is sold by several vendors including, for example, Applied Biosystems (Foster City, Calif.). Any other means for such synthesis known in the art may additionally or alternatively be employed. It is well known to use similar techniques to prepare oligonucleotides such as the phosphorothioates and alkylated derivatives.

[0522] The antisense compounds of the invention are synthesized in vitro and do not include antisense compositions of biological origin, or genetic vector constructs designed to direct the in vivo synthesis of antisense molecules. The compounds of the invention may also be admixed, encapsulated, conjugated or otherwise associated with other molecules, molecule structures or mixtures of compounds, as for example, liposomes, receptor targeted molecules, oral, rectal, topical or other formulations, for assisting in uptake, distribution and/or absorption. Representative United States patents that teach the preparation of such uptake, distribution and/or absorption assisting formulations include, but are not limited to, U.S. Pat. Nos. 5,108,921; 5,354,844; 5,416,016; 5,459,127; 5,521,291; 5,543,158; 5,547,932; 5,583,020; 5,591,721; 4,426,330; 4,534,899; 5,013,556; 5,108,921; 5,213,804; 5,227,170; 5,264,221; 5,356,633; 5,395,619; 5,416,016; 5,417,978; 5,462,854; 5,469,854; 5,512,295; 5,527,528; 5,534,259; 5,543,152; 5,556,948; 5,580,575; and 5,595,756, each of which is herein incorporated by reference.

[0523] The antisense compounds of the present invention can be utilized for diagnostics, therapeutics, and prophylaxis and as research reagents and kits. For therapeutics, an animal, preferably a human, suspected of having a disease or disorder, which can be treated by modulating the expression of SEQ ID NOs:39-49, SEQ ID NOs:51-76, and SEQ ID NO: 3114, is treated by administering antisense compounds in accordance with this invention. The compounds of the invention can be utilized in pharmaceutical compositions by adding an effective amount of an antisense compound to a suitable pharmaceutically acceptable diluent or carrier. Use of the antisense compounds and methods of the invention may also be useful prophylactically, e.g., to prevent or delay infection, inflammation, or tumor formation, for example.

[0524] The antisense compounds of the invention are useful for research and diagnostics, because these compounds hybridize to nucleic acids encoding SEQ ID NOs:39-49, SEQ ID NOs:51-76, and SEQ ID NO: 3114, enabling sandwich and other assays to easily be constructed to exploit this fact. Hybridization of the antisense oligonucleotides of the invention with a nucleic acid encoding SEQ ID NOs:39-49, SEQ ID NOs:51-76, and SEQ ID NO: 3114 can be detected by means known in the art. Such means may include conjugation of an enzyme to the oligonucleotide, radiolabelling of the oligonucleotide or any other suitable detection means. Kits using such detection means for detecting the level of SEQ ID NOs:39-49, SEQ ID NOs:51-76, and SEQ ID NO: 3114 in a sample may also be prepared.

[0525] Potential antagonists include small molecules that bind to the active site, the protein-binding site, or other relevant binding site (e.g., co-factor binding site, substrate binding site) of the polypeptide, thereby blocking the normal biological activity of the polypeptide. Examples of small molecules include, but are not limited to, small peptides or peptide-like molecules, preferably soluble peptides, and synthetic non-peptidyl organic or inorganic compounds.

[0526] Ribozymes are enzymatic RNA molecules capable of catalyzing the specific cleavage of RNA. Ribozymes act by sequence-specific hybridization to the complementary target RNA, followed by endo nucleolytic cleavage. Specific ribozyme cleavage sites within a potential RNA target can be identified by known techniques. For further details see, e.g., Rossi, Current Biology, 4:469-471 (1994), and PCT publication No. WO 97/33551 (published Sep. 18, 1997).

[0527] Nucleic acid molecules in triple-helix formation used to inhibit transcription should be single-stranded and composed of deoxynucleotides, The base composition of these oligonucleotides is designed such that it promotes triple-helix formation via Hoogsteen base-pairing rules, which generally require sizeable stretches of purines or pyrimidines on one strand of a duplex. For further details see, e.g., PCT publication No. WO 97/33551, supra. Such molecules can have backbone bonds not naturally found in DNA or RNA.

[0528] These small molecules can be identified by any one or more of the screening assays discussed herein and/or by any other screening techniques well known for those skilled in the art.

[0529] All assays for antagonists are common in that they call for contacting the drug candidate with a polypeptide encoded by a nucleic acid identified herein under conditions and for a time sufficient to allow these two components to interact.

[0530] Assays for Antagonists

[0531] In another assay for antagonists, mammalian cells or a membrane preparation expressing the receptor would be incubated with labeled polypeptide in the presence of the candidate compound. The ability of the compound to enhance or block this interaction could then be measured.

[0532] Potential antagonists include small molecules that bind to the active site, the receptor-binding site, or growth factor or other relevant binding site of the polypeptide, thereby blocking the normal biological activity of the polypeptide. Examples of small molecules include, but are not limited to, antibodies, small peptides or peptide-like molecules, preferably soluble peptides, and synthetic non-peptidyl organic or inorganic compounds.

[0533] Drug Screening

[0534] This invention is particularly useful for screening compounds by using polypeptides or binding fragment thereof in any of a variety of drug screening techniques. The polypeptide or fragment employed in such a test can either be free in solution, affixed to a solid support, borne on a cell surface, or located intracellularly. One method of drug screening utilizes eukaryotic or prokaryotic host cells, which are stably transformed with recombinant nucleic acids expressing the polypeptide or fragment. Drugs are screened against such transformed cells in competitive binding assays. Such cells, either in viable or fixed form, can be used for standard binding assays. One can measure, for example, the formation of complexes between polypeptide or a fragment and the agent being tested. Alternatively, one can examine the diminution in complex formation between the polypeptide and its target cell or target receptors caused by the agent being tested.

[0535] Thus, the present invention provides methods of screening for drugs or any other agents, which can affect a disease or disorder associated with a protein of the present invention. These methods comprise contacting such an agent with an polypeptide or fragment thereof and assaying (i) for the presence of a complex between the agent and the polypeptide or fragment, or (ii) for the presence of a complex between the polypeptide or fragment and the cell, by methods well known in the art. In such competitive binding assays, the polypeptide or fragment is typically labeled. After suitable incubation, free polypeptide or fragment is separated from that present in bound form, and the amount of free or uncomplexed label is a measure of the ability of the particular agent to bind to polypeptide or to interfere with the polypeptide/cell complex.

[0536] Another technique for drug screening provides high throughput screening for compounds having suitable binding affinity to a polypeptide and is described in detail in WO 84/03564, published on Sep. 13, 1984. Briefly stated, large numbers of different small peptide test compounds are synthesized on a solid substrate, such as plastic pins or some other surface. As applied to a protein of the present invention, the peptide test compounds are reacted with polypeptide and washed. Bound polypeptide is detected by methods well known in the art. Purified polypeptide can also be coated directly onto plates for use in the aforementioned drug screening techniques. In addition, non-neutralizing antibodies can be used to capture the peptide and immobilize it on the solid support.

[0537] This invention also contemplates the use of competitive drug screening assays in which neutralizing antibodies capable of binding polypeptide specifically compete with a test compound for binding to polypeptide or fragments thereof. In this manner, the antibodies can be used to detect the presence of any peptide which shares one or more antigenic determinants with polypeptide.

[0538] Disorders to be Treated

[0539] Cancerous Disorders

[0540] Polypeptides of the invention may be involved in cancer cell generation, proliferation or metastasis. Detection of the presence or amount of polynucleotides or polypeptides of the invention may be useful for the diagnosis and/or prognosis of one or more types of cancer. For example, the presence or increased expression of a polynucleotide/polypeptide of the invention may indicate a hereditary risk of cancer, a precancerous condition, or an ongoing malignancy. Conversely, a defect in the gene or absence of the polypeptide may be associated with a cancer condition. Identification of single nucleotide polymorphisms associated with cancer or a predisposition to cancer may also be useful for diagnosis or prognosis.

[0541] Cancer treatments promote tumor regression by inhibiting tumor cell proliferation, inhibiting angiogenesis (growth of new blood vessels that is necessary to support tumor growth) and/or prohibiting metastasis by reducing tumor cell motility or invasiveness. Therapeutic compositions of the invention may be effective in adult and pediatric oncology including in solid phase tumors/malignancies, locally advanced tumors, human soft tissue sarcomas, metastatic cancer, including lymphatic metastases, blood cell malignancies including multiple myeloma, acute and chronic leukemias, and lymphomas, head and neck cancers including mouth cancer, larynx cancer and thyroid cancer, lung cancers including small cell carcinoma and non-small cell cancers, breast cancers including small cell carcinoma and ductal carcinoma, gastrointestinal cancers including esophageal cancer, stomach cancer, colon cancer, colorectal cancer and polyps associated with colorectal neoplasia, pancreatic cancers, liver cancer, urologic cancers including bladder cancer and prostate cancer, malignancies of the female genital tract including ovarian carcinoma, uterine (including endometrial) cancers, and solid tumor in the ovarian follicle, kidney cancers including renal cell carcinoma, brain cancers including intrinsic brain tumors, neuroblastoma, astrocytic brain tumors, gliomas, metastatic tumor cell invasion in the central nervous system, bone cancers including osteomas, skin cancers including malignant melanoma, tumor progression of human skin keratinocytes, squamous cell carcinoma, basal cell carcinoma, hemangiopericytoma and Karposi's sarcoma.

[0542] Leukemias

[0543] Leukemias and related disorders may be treated or prevented by administration of a therapeutic that promotes or inhibits function of the polynucleotides and/or polypeptides of the invention. Such leukemias and related disorders include but are not limited to acute leukemia, acute lymphocytic leukemia, acute myelocytic leukemia, myeloblastic, promyclocytic, myelomonocytic, monocytic, erythroleukemia, chronic leukemia, chronic myelocytic (granulocytic) leukemia and chronic lymphocytic leukemia (for a review of such disorders, see Fishman et al., 1985, Medicine, 2d Ed., J. B. Lippincott Co., Philadelphia).

[0544] Other Activities

[0545] A polypeptide of the invention may also exhibit one or more of the following additional activities or effects: inhibiting the growth, infection or function of, or killing, infectious agents, including, without limitation, bacteria, viruses, fungi and other parasites; effecting (suppressing or enhancing) bodily characteristics, including, without limitation, height, weight, hair color, eye color, skin, fat to lean ratio or other tissue pigmentation, or organ or body part size or shape (such as, for example, breast augmentation or diminution, change in bone form or shape); effecting biorhythms or circadian cycles or rhythms; effecting the fertility of male or female subjects; effecting the metabolism, catabolism, anabolism, processing, utilization, storage or elimination of dietary fat, lipid, protein, carbohydrate, vitamins, minerals, co-factors or other nutritional factors or component(s); effecting behavioral characteristics, including, without limitation, appetite, libido, stress, cognition (including cognitive disorders), depression (including depressive disorders) and violent behaviors; providing analgesic effects or other pain reducing effects; promoting differentiation and growth of embryonic stem cells in lineages other than hematopoietic lineages; hormonal or endocrine activity; in the case of enzymes, correcting deficiencies of the enzyme and treating deficiency-related diseases; treatment of hyperproliferative disorders (such as, for example, psoriasis); immunoglobulin-like activity (such as, for example, the ability to bind antigens or complement); and the ability to act as an antigen in a vaccine composition to raise an immune response against such protein or another material or entity which is cross-reactive with such protein.

[0546] Applications, Administration Protocols, Schedules, Doses, and Formulations

[0547] The molecules herein and agonists and antagonists thereto are pharmaceutically useful as a prophylactic and therapeutic agent for various disorders and diseases as set forth above.

[0548] Therapeutic compositions of the polypeptides or agonists or antagonists are prepared for storage by mixing the desired molecule having the appropriate degree of purity with optional pharmaceutically acceptable carriers, excipients, or stabilizers Remington's Pharmaceutical Sciences, 16th edition, Osol, A. ed. (1980)), in the form of lyophilized formulations or aqueous solutions. Acceptable carriers, excipients, or stabilizers are nontoxic to recipients at the dosages and concentrations employed, and include buffers such as phosphate, citrate, and other organic acids; antioxidants including ascorbic acid and methionine; preservatives (such as octadecyldimethylbenzyl ammonium chloride; hexamethonium chloride; benzalkonium chloride, benzethonium chloride; phenol, butyl or benzyl alcohol; alkyl parabens such as methyl or propyl paraben; catechol; resorcinol; cyclohexanol; 3-pentanol; and m-cresol); low molecular weight (less than about 10 residues) polypeptides; proteins, such as serum albumin, gelatin, or immunoglobulins; hydrophilic polymers such as polyvinylpyrrolidone; amino acids such as glycine, glutamine, asparagine, histidine, arginine, or lysine; monosaccharides, disaccharides, and other carbohydrates including glucose, mannose, or dextrins; chelating agents such as EDTA; sugars such as sucrose, mannitol, trehalose or sorbitol; salt-forming counter-ions such as sodium; metal complexes (e.g., Zn-protein complexes); and/or non-ionic surfactants such as TWEEN™, PLURONICS™ or polyethylene glycol (PEG).

[0549] Additional examples of such carriers include ion exchangers, alumina, aluminum stearate, lecithin, serum proteins, such as human serum albumin, buffer substances such as phosphates, glycine, sorbic acid, potassium sorbate, partial glyceride mixtures of saturated vegetable fatty acids, water, salts, or electrolytes such as protamine sulfate, disodium hydrogen phosphate, potassium hydrogen phosphate, sodium chloride, zinc salts, colloidal silica, magnesium trisilicate, polyvinyl pyrrolidone, cellulose-based substances, and polyethylene glycol. Carriers for topical or gel-based forms of antagonist include polysaccharides such as sodium carboxymethylcellulose or methylcellulose, polyvinylpyrrolidone, polyacrylates, polyoxyethylene-polyoxypropylene-block polymers, polyethylene glycol, and wood wax alcohols. For all administrations, conventional depot forms are suitably used. Such forms include, for example, microcapsules, nano-capsules, liposomes, plasters, inhalation forms, nose sprays, sublingual tablets, and sustained-release preparations. The polypeptides, agonists, or antagonists will typically be formulated in such vehicles at a concentration of about 0.1 mg/ml to 100 mg/ml.

[0550] Another formulation comprises incorporating a polypeptide or antagonist thereof into formed articles. Such articles can be used in modulating cancer cell growth. In addition, tumor invasion and metastasis may be modulated with these articles.

[0551] Polypeptide or antagonist to be used for in vivo administration must be sterile. This is readily accomplished by filtration through sterile filtration membranes, prior to or following lyophilization and reconstitution. Polypeptide ordinarily will be stored in lyophilized form or in solution if administered systemically. If in lyophilized form, polypeptide or antagonist thereto is typically formulated in combination with other ingredients for reconstitution with an appropriate diluent at the time for use. An example of a liquid formulation of a polypeptide or antagonist is a sterile, clear, colorless unpreserved solution filled in a single-dose vial for subcutaneous injection. Preserved pharmaceutical compositions suitable for repeated use may contain, for example, depending mainly on the indication and type of polypeptide: a) a polypeptide or agonist or antagonist thereto; b) a buffer capable of maintaining the pH in a range of maximum stability of the polypeptide or other molecule in solution, preferably about 4-8; c) a detergent/surfactant primarily to stabilize the polypeptide or molecule against agitation-induced aggregation; d) an isotonifier; e) a preservative selected from the group of phenol, benzyl alcohol and a benzethonium halide, e.g., chloride; and water.

[0552] If the detergent employed is non-ionic, it may, for example, be polysorbates (e.g., POLYSORBATE™ (TWEEN™) 20, 80, etc.) or poloxamers (e.g., POLOXAMER™ 188). The use of non-ionic surfactants permits the formulation to be exposed to shear surface stresses without causing denaturation of the polypeptide. Further, such surfactant-containing formulations may be employed in aerosol devices such as those used in a pulmonary dosing, and needleless jet injector guns (see, e.g., EP 257,956).

[0553] An isotonifier may be present to ensure isotonicity of a liquid composition of the polypeptide or antagonist thereto, and includes polyhydric sugar alcohols, preferably trihydric or higher sugar alcohols, such as glycerin, erythritol, arabitol, xylitol, sorbitol, and mannitol. These sugar alcohols can be used alone or in combination. Alternatively, sodium chloride or other appropriate inorganic salts may be used to render the solutions isotonic.

[0554] The buffer may, for example, be an acetate, citrate, succinate, or phosphate buffer depending on the pH desired. The pH of one type of liquid formulation of this invention is buffered in the range of about 4 to 8, preferably about physiological pH.

[0555] The preservatives phenol, benzyl alcohol and benzethonium halides, e.g., chloride, are known antimicrobial agents that may be employed.

[0556] Therapeutic polypeptide compositions generally are placed into a container having a sterile access port, for example, an intravenous solution bag, or vial having a stopper pierceable by a hypodermic injection needle. The formulations are preferably administered as repeated intravenous (iv.), subcutaneous (s.c.), or intramuscular (i.m.) injections, or as aerosol formulations suitable for intranasal or intrapulmonary delivery (for intrapulmonary delivery see, e.g., EP 257,956).

[0557] The polypeptide can also be administered in the form of sustained-released preparations. Suitable examples of sustained-release preparations include semipermeable matrices of solid hydrophobic polymers containing the protein, which matrices are in the form of shaped articles, e.g., films, or microcapsules. Examples of sustained-release matrices include polyesters, hydrogels (e.g., poly(2-hydroxyethyl-methacrylate) as described by Langer et al., J. Biomed. Mater. Res., 15: 167-277 (1981) and Langer, Chem. Tech., 12: 98-105 (1982) or poly(vinylalcohol)), polylactides (U.S. Pat. No. 3,773,919, EP 58,481), copolymers of L-glutamic acid and gamma ethyl-L-glutamate (Sidman et al., Biopolymers, 22: 547-556 (1983)), non-degradable ethylene-vinyl acetate (Langer et al., supra), degradable lactic acid-glycolic acid copolymers such as the Lupron Depot™ (injectable microspheres composed of lactic acid-glycolic acid copolymer and leuprolide acetate), and poly-D-(−)-3hydroxybutyric acid (EP 133 988).

[0558] While polymers such as ethylene-vinyl acetate and lactic acid-glycolic acid enable release of molecules for over 100 days, certain hydrogels release proteins for shorter time periods. When encapsulated proteins remain in the body for a long time, they may denature or aggregate as a result of exposure to moisture at 37° C., resulting in a loss of biological activity and possible changes in immunogenicity. Rational strategies can be devised for protein stabilization depending on the mechanism involved. For example, if the aggregation mechanism is discovered to be intermolecular S—S bond formation through thio-disulfide interchange, stabilization may be achieved by modifying sulfhydryl residues, lyophilizing from acidic solutions, controlling moisture content, using appropriate additives, and developing specific polymer matrix compositions.

[0559] Sustained-release polypeptide compositions also include liposomally entrapped polypeptides. Liposomes containing the polypeptide are prepared by methods known per se: DE 3,218,121; Epstein et al., Proc. Natl. Acad. Sci. USA, 82: 3688-3692 (1985); Hwang et al., Proc. Natl. Acad. Sci. USA, 77: 4030-4034 (1980); EP 52 322; EP 36 676; EP 88 046; EP 143 949; EP 142,641; Japanese patent application 83-118008; U.S. Pat. Nos. 4,485,045 and 4,544,545; and EP 102 324. Ordinarily the liposomes are of the small (about 200-800 Angstroms) unilamellar type in which the lipid content is greater than about 30 mol. % cholesterol, the selected proportion being adjusted for the optimal therapy.

[0560] The therapeutically effective dose of polypeptide or antagonist thereto will, of course, vary depending on such factors as the pathological condition to be treated (including prevention), the method of administration, the type of compound being used for treatment, any co-therapy involved, the patient's age, weight, general medical condition, medical history, etc., and its determination is well within the skill of a practicing physician. Accordingly, it will be necessary for the therapist to titer the dosage and modify the route of administration as required to obtain the maximal therapeutic effect. If the polypeptide has a narrow host range, for the treatment of human patients formulations comprising human polypeptide, more preferably native-sequence human polypeptide, are preferred. The clinician will administer polypeptide until a dosage is reached that achieves the desired effect for treatment of the condition in question. For example, if the objective is the treatment of CHF, the amount would be one that inhibits the progressive cardiac hypertrophy associated with this condition. The progress of this therapy is easily monitored by echocardiography. Similarly, in patients with hypertrophic cardiomyopathy, polypeptide can be administered on an empirical basis.

[0561] With the above guidelines, the effective dose generally is within the range of from about 0.001 to about 1.0 mg/kg, more preferably about 0.0°-1.0 mg/kg, most preferably about 0.01-0.1 mg/kg.

[0562] For non-oral use in treating human adult hypertension, it is advantageous to administer polypeptide in the form of an injection at about 0.01 to 50 mg, preferably about 0.05 to 20 mg, most preferably 1 to 20 mg, per kg body weight, 1 to 3 times daily by intravenous injection. For oral administration, a molecule based on the polypeptide is preferably administered at about 5 mg to 1 g, preferably about 10 to 100 mg, per kg body weight, 1 to 3 times daily. It should be appreciated that endotoxin contamination should be kept minimally at a safe level, for example, less than 0.5 ng/mg protein. Moreover, for human administration, the formulations preferably meet sterility, pyrogenicity, general safety, and purity as required by FDA Office and Biologics standards.

[0563] The dosage regimen of a pharmaceutical composition containing polypeptide to be used in tissue regeneration will be determined by the attending physician considering various factors that modify the action of the polypeptides, e.g., amount of tissue weight desired to be formed, the site of damage, the condition of the damaged tissue, the size of a wound, type of damaged tissue (e.g., bone), the patient's age, sex, and diet, the severity of any infection, time of administration, and other clinical factors. The dosage may vary with the type of matrix used in the reconstitution and with inclusion of other proteins in the pharmaceutical composition. For example, the addition of other known growth factors, such as IGF-I, to the final composition may also affect the dosage. Progress can be monitored by periodic assessment of tissue/bone growth and/or repair, for example, X-rays, histomorphometric determinations, and tetracycline labeling.

[0564] The route of polypeptide or antagonist or agonist administration is in accord with known methods, e.g., by injection or infusion by intravenous, intramuscular, intracerebral, intraperitoneal, intracerebral spinal, subcutaneous, intraocular, intraarticular, intrasynovial, intrathecal, oral, topical, or inhalation routes, or by sustained-release systems as noted below. The polypeptide or antagonists thereof also are suitably administered by intratumoral, peritumoral, intralesional, or perilesional routes, to exert local as well as systemic therapeutic effects. The intraperitoneal route is expected to be particularly useful, for example, in the treatment of ovarian tumors.

[0565] If a peptide or small molecule is employed as an antagonist or agonist, it is preferably administered orally or non-orally in the form of a liquid or solid to mammals.

[0566] Examples of pharmacologically acceptable salts of molecules that form salts and are useful hereunder include alkali metal salts (e.g., sodium salt, potassium salt), alkaline earth metal salts (e.g., calcium salt, magnesium salt), ammonium salts, organic base salts (e.g., pyridine salt, triethylamine salt), inorganic acid salts (e.g., hydrochloride, sulfate, nitrate), and salts of organic acid (e.g., acetate, oxalate, p-toluenesulfonate). Therapeutic compositions and combination therapy

[0567] Polypeptides, polynucleotides, or modulators of polypeptides of the invention (including inhibitors and stimulators of the biological activity of the polypeptide of the invention) may be administered to treat cancer. Therapeutic compositions can be administered in therapeutically effective dosages alone or in combination with adjuvant cancer therapy such as surgery, chemotherapy, radiotherapy, thermotherapy, and laser therapy, and may provide a beneficial effect, e.g. reducing tumor size, slowing rate of tumor growth, inhibiting metastasis, or otherwise improving overall clinical condition, without necessarily eradicating the cancer.

[0568] The composition can also be administered in therapeutically effective amounts as a portion of an anti-cancer cocktail. An anti-cancer cocktail is a mixture of the polypeptide or modulator of the invention with one or more anti-cancer drugs in addition to a pharmaceutically acceptable carrier for delivery. The use of anti-cancer cocktails as a cancer treatment is routine. Anti-cancer drugs that are well known in the art and can be used as a treatment in combination with the polypeptide or modulator of the invention include: Actinomycin D, Aminoglutethimide, Asparaginase, Bleomycin, Busulfan. Carboplatin, Carmustine, Chlorambucil, Cisplatin (cis-DDP), Cyclophosphamide, Cytarabine HCl (Cytosine arabinoside), Dacarbazine, Dactinomycin, Daunorubicin HCl, Doxorubicin HCl, Estramustine phosphate sodium, Etoposide (V16-213), Floxuridine, 5-Fluorouracil (5-Fu), Flutamide, Hydroxyurea (hydroxycarbamide), Ifosfamide, Interferon Alpha-2a, Interferon Alpha-2b, Leuprolide acetate (LHRH-releasing factor analog), Lomustine, Mechlorethamine HCl (nitrogen mustard), Melphalan, Mercaptopurine, Mesna, Methotrexate (MTX), Mitomycin, Mitoxantrone HCl, Octreotide, Plicamycin, Procarbazine HCl, Streptozocin, Tamoxifen citrate, Thioguanine, Thiotepa, Vinblastine sulfate, Vincristine sulfate, Amsacrine, Azacitidine, Hexamethylmelamine, Interleukin-2, Mitoguazone, Pentostatin, Semustine, Teniposide, and Vindesine sulfate.

[0569] In addition, therapeutic compositions of the invention may be used for prophylactic treatment of cancer. There are hereditary conditions and/or environmental situations (e.g. exposure to carcinogens) known in the art that predispose an individual to developing cancers. Under these circumstances, it may be beneficial to treat these individuals with therapeutically effective doses of the polypeptide of the invention to reduce the risk of developing cancers.

[0570] Pharmaceutical Compositions of Antibodies

[0571] Antibodies specifically binding a polypeptide identified herein, as well as other molecules identified by the screening assays disclosed herein, can be administered for the treatment of various disorders in the form of pharmaceutical compositions.

[0572] If the polypeptide is intracellular and whole antibodies are used as inhibitors, internalizing antibodies are preferred. However, lipofections or liposomes can also be used to deliver the antibody, or an antibody fragment, into cells. Where antibody fragments are used, the smallest inhibitory fragment that specifically binds to the binding domain of the target protein is preferred. For example, based upon the variable-region sequences of an antibody, peptide molecules can be designed that retain the ability to bind the target protein sequence. Such peptides can be synthesized chemically and/or produced by recombinant DNA technology. See, e.g., Marasco et al., Proc. Natl. Acad. Sci. USA, 90: 7889-7893 (1993). The formulation herein can also contain more than one active compound as necessary for the particular indication being treated, preferably those with complementary activities that do not adversely affect each other. Alternatively, or in addition, the composition can comprise an agent that enhances its function, such as, for example, a cytotoxic agent, cytokine, chemotherapeutic agent, or growth-inhibitory agent. Such molecules are suitably present in combination in amounts that are effective for the purpose intended.

[0573] In Vitro Models for Effective Doses

[0574] In vitro models can be used to determine the effective doses of the polypeptide of the invention as a potential cancer treatment. These in vitro models include proliferation assays of cultured tumor cells, growth of cultured tumor cells in soft agar (see Freshney, (1987) Culture of Animal Cells: A Manual of Basic Technique, Wily-Liss, New York, N.Y. Ch 18 and Ch 21), tumor systems in nude mice as described in Giovanella et al., J. Natl. Can. Inst., 52: 921-30 (1974), mobility and invasive potential of tumor cells in Boyden Chamber assays as described in Pilkington et al., Anticancer Res., 17: 4107-9 (1997), and angiogenesis assays such as induction of vascularization of the chick chorioallantoic membrane or induction of vascular endothelial cell migration as described in Ribatta et al., Intl. J. Dev. Biol., 40: 1189-97 (1999) and Li et al., Clin. Exp. Metastasis, 17:423-9 (1999), respectively. Suitable tumor cells lines are available, e.g. from American Type Tissue Culture Collection catalogs.

[0575] Articles of Manufacture

[0576] An article of manufacture such as a kit containing polypeptide or antagonists thereof useful for the diagnosis or treatment of the disorders described above comprises at least a container and a label. Suitable containers include, for example, bottles, vials, syringes, and test tubes. The containers may be formed from a variety of materials such as glass or plastic. The container holds a composition that is effective for diagnosing or treating the condition and may have a sterile access port (for example, the container may be an intravenous solution bag or a vial having a stopper pierceable by a hypodermic injection needle). The active agent in the composition is the polypeptide or an agonist or antagonist thereto. The label on, or associated with, the container indicates that the composition is used for diagnosing or treating the condition of choice. The article of manufacture may further comprise a second container comprising a pharmaceutically acceptable buffer, such as phosphate-buffered saline, Ringer's solution, and dextrose solution. It may further include other materials desirable from a commercial and user standpoint, including other buffers, diluents, filters, needles, syringes, and package inserts with instructions for use. The article of manufacture may also comprise a second or third container with another active agent as described above.

[0577] Diagnosis, Prognosis, and Management of Cancer

[0578] The polynucleotides described herein, as well as their gene products and corresponding genes and gene products, are of particular interest as genetic or biochemical markers (e.g., in blood or tissues) that will detect the earliest changes along the carcinogenesis pathway and/or to monitor the efficacy of various therapies and preventive interventions.

[0579] For example, the level of expression of certain polynucleotides can be indicative of a poorer prognosis, and therefore warrant more aggressive chemo- or radio-therapy for a patient or vice versa.

[0580] The correlation of novel surrogate tumor specific features with response to treatment and outcome in patients can define prognostic indicators that allow the design of tailored therapy based on the molecular profile of the tumor. These therapies include antibody targeting, antagonists (e.g., small molecules), and gene therapy.

[0581] Determining expression of certain polynucleotides and comparison of a patients profile with known expression in normal tissue and variants of the disease allows a determination of the best possible treatment for a patient, both in terms of specificity of treatment and in terms of comfort level of the patient. Surrogate tumor markers, such as polynucleotide expression, can also be used to better classify, and thus diagnose and treat, different forms and disease states of cancer. Two classifications widely used in oncology that can benefit from identification of the expression levels of the genes corresponding to the polynucleotides described herein are staging of the cancerous disorder, and grading the nature of the cancerous tissue.

[0582] The polynucleotides that correspond to differentially expressed genes, as well as their encoded gene products, can be useful to monitor patients having or susceptible to cancer to detect potentially malignant events at a molecular level before they are detectable at a gross morphological level. In addition, the polynucleotides described herein, as well as the genes corresponding to such polynucleotides, can be useful as therametrics, e.g., to assess the effectiveness of therapy by using the polynucleotides or their encoded gene products, to assess, for example, tumor burden in the patient before, during, and after therapy.

[0583] Furthermore, a polynucleotide identified as corresponding to a gene that is differentially expressed in, and thus is important for, one type of cancer can also have implications for development or risk of development of other types of cancer, e.g., where a polynucleotide represents a gene differentially expressed across various cancer types. Thus, for example, expression of a polynucleotide corresponding to a gene that has clinical implications for metastatic colon cancer can also have clinical implications for breast cancer or ovarian cancer.

[0584] Staging.

[0585] Staging is a process used by physicians to describe how advanced the cancerous state is in a patient. Staging assists the physician in determining a prognosis, planning treatment and evaluating the results of such treatment. Staging systems vary with the types of cancer, but generally involve the following “TNM” system: the type of tumor, indicated by T and a number which describes the tumor's size; whether the cancer has metastasized to nearby lymph nodes, indicated by N; and whether the cancer has metastasized to more distant parts of the body, indicated by M. Generally, if a cancer is only detectable in the area of the primary lesion without having spread to any lymph nodes it is called Stage I. If it has spread only to the closest lymph nodes, it is called Stage II. In Stage III, the cancer has generally spread to the lymph nodes in near proximity to the site of the primary lesion. Cancers that have spread to a distant part of the body, such as the liver, bone, brain or other site, are Stage IV, the most advanced stage.

[0586] The polynucleotides and corresponding genes and gene products described herein can facilitate fine-tuning of the staging process by identifying markers for the aggressiveness of a cancer, e.g. the metastatic potential, as well as the presence in different areas of the body. Thus, a Stage II cancer with a polynucleotide signifying a high metastatic potential cancer can be used to change a borderline Stage II tumor to a Stage III tumor, justifying more aggressive therapy. Conversely, the presence of a polynucleotide signifying a lower metastatic potential allows more conservative staging of a tumor.

[0587] Grading of Cancers.

[0588] Grade is a term used to describe how closely a tumor resembles normal tissue of its same type. The microscopic appearance of a tumor is used to identify tumor grade based on parameters such as cell morphology, cellular organization, and other markers of differentiation. As a general rule, the grade of a tumor corresponds to its rate of growth or aggressiveness, with undifferentiated or high-grade tumors generally being more aggressive than well differentiated or low grade tumors. The following guidelines are generally used for grading tumors: 1) GX Grade cannot be assessed; 2) G1 Well differentiated; G2 Moderately well differentiated; 3) G3 Poorly differentiated; 4) G4 Undifferentiated. The polynucleotides of the SEQ ID NOs:77-3011 and their corresponding genes and gene products, can be especially valuable in determining the grade of the tumor, as they not only can aid in determining the differentiation status of the cells of a tumor, they can also identify factors other than differentiation that are valuable in determining the aggressiveness of a tumor, such as metastatic potential.

[0589] Detection of Colon Cancer.

[0590] The polynucleotides corresponding to genes that exhibit the appropriate expression pattern can be used to detect colon cancer in a subject. Colorectal cancer is one of the most common neoplasms in humans and perhaps the most frequent form of hereditary neoplasia.

[0591] Prevention and early detection are key factors in controlling and curing colorectal cancer. Colorectal cancer begins as polyps, which are small, benign growths of cells that form on the inner lining of the colon. Over a period of several years, some of these polyps accumulate additional mutations and become cancerous. Multiple familial colorectal cancer disorders have been identified, which are summarized as follows: 1) Familial adenomatous polyposis (FAP); 2) Gardner's syndrome; 3) Hereditary nonpolyposis colon cancer (HNPCC); and 4) Familial colorectal cancer in Ashkenazi Jews.

[0592] The expression of appropriate polynucleotides can be used in the diagnosis, prognosis and management of colorectal cancer. Detection of colon cancer can be determined using expression levels of any of these sequences alone or in combination with the levels of expression. Determination of the aggressive nature and/or the metastatic potential of a colon cancer can be determined by comparing levels of one or more gene products of the genes corresponding to the polynucleotides described herein, and comparing total levels of another sequence known to vary in cancerous tissue, e.g., expression of p53, DCC, ras, FAP (see, e.g., Fearon E R, et al, Cell (1990) 61(5):759; Hamilton S R et al., Cancer (1993) 72:957; Bodmer W, et al., Nat Genet. (1994) 4(3):217; Fearon E R, Ann NY Acad Sci. (1995) 768:101).

[0593] For example, development of colon cancer can be detected by examining the level of expression of a gene corresponding to a polynucleotides described herein to the levels of oncogenes (e.g. ras) or tumor suppressor genes (e.g. FAP or p53). Thus expression of specific marker polynucleotides can be used to discriminate between normal and cancerous colon tissue, to discriminate between colon cancers with different cells of origin, to discriminate between colon cancers with different potential metastatic rates, etc. For a review of markers of cancer, see, e.g., Hanahan et al. (2000) Cell 100:57-70.

[0594] Monitoring Efficacy in Clinical Trials

[0595] The invention also features a method of monitoring the efficacy of a compound in clinical trials for inhibition of tumors, e.g., colon tumors, in a patient by obtaining a first sample of tumor tissue cells from the patient; administering the compound to the patient; after a time sufficient for the compound to inhibit the tumor, obtaining a second sample of tumor tissue cells from the patient; and detecting in the first and second samples the level any one or more of SEQ ID NO:77-1993, SEQ ID NOs:3012-3083, or the genes of SEQ ID NO:1-11, SEQ ID NOs:13-38, and SEQ ID NO:3113 wherein a level lower in the second sample than in the first sample indicates that the compound is effective to inhibit a tumor in the patient. Alternatively, the efficacy of a compound in clinical trials for inhibition of tumors, e.g., colon tumors, in a patient can be monitored by obtaining a first sample of tumor tissue cells from the patient; administering the compound to the patient; after a time sufficient for the compound to inhibit the tumor, obtaining a second sample of tumor tissue cells from the patient; and detecting in the first and second samples the level of any one or more of nucleic acid sequences of SEQ ID NOs:1994-3011 wherein a level higher in the second sample than in the first sample indicates that the compound is effective to inhibit a tumor in the patient.

[0596] Monitoring the influence of agents (e.g., drugs, compounds) on inhibition of tumor growth (e.g., the ability to modulate aberrant cell proliferation and/or differentiation) can be applied not only in basic drug screening, but also in clinical trials. For example, the effectiveness of an agent, as determined by a screening assay as described herein, to increase gene expression, protein levels or protein activity, can be monitored in clinical trials of subjects exhibiting decreased gene expression, protein levels, or protein activity. Alternatively, the effectiveness of an agent, as determined by a screening assay, to decrease gene expression, protein levels, or protein activity, can be monitored in clinical trials of subjects exhibiting increased gene expression, protein levels, or protein activity. In such clinical trials, expression or activity of the polypeptide and preferably, that of other polypeptides that have been implicated in colon cancer, can be used as markers.

[0597] For example, and not by way of limitation, genes, including those of the invention, that are modulated in cells by treatment with an agent (e.g., compound, drug or small molecule), which modulates tumor growth (e.g., as identified in a screening assay described herein) can be identified. Thus, to study the effect of agents on cancer, e.g., colon cancer, for example, in a clinical trial, cells can be isolated and RNA prepared and analyzed for the levels of expression of a gene of the invention and other genes implicated in the disorder. The levels of gene expression (i.e., a gene expression pattern) can be quantified by Northern blot analysis or RT-PCR, as described herein, or alternatively by measuring the amount of protein produced, by one of the methods as described herein, or by measuring the levels of activity of a gene of the invention or other genes. In this way, the gene expression pattern can serve as a marker, indicative of the physiological response of the cells to the agent. Accordingly, this response state may be determined before, and at various points during, treatment of the individual with the agent.

[0598] In a preferred embodiment, the present invention provides a method for monitoring the effectiveness of treatment of a subject with an agent (e.g., an agonist, antagonist, peptidomimetic, protein, peptide, nucleic acid, small molecule, antibody or other drug candidate identified by the screening assays described herein) comprising the steps of (i) obtaining a pre-administration sample from a subject prior to administration of the agent; (ii) detecting the level of the polypeptide or nucleic acid of the invention in the pre-administration sample; (iii) obtaining one or more post-administration samples from the subject; (iv) detecting the level the of the polypeptide or nucleic acid of the invention in the post-administration sample; (v) comparing the level of the polypeptide or nucleic acid of the invention in the pre-administration sample with the level of the polypeptide or nucleic acid of the invention in the post-administration sample or samples; and (vi) altering the administration of the agent to the subject accordingly. For example, increased administration of the agent may be desirable to reduce expression or activity of the polypeptide, i.e., to increase the effectiveness of the agent.

[0599] Definitions

[0600] A “native sequence” comprises a polypeptide having the same amino acid sequence as a protein of the present invention derived from nature. Such native sequences can be isolated from nature or can be produced by recombinant and/or synthetic means. The term “native sequence” specifically encompasses naturally occurring truncated or secreted forms (e.g., an extracellular domain sequence), naturally occurring variant forms (e.g., alternatively spliced forms), and naturally occurring allelic variants of the protein. In one embodiment of the invention, the native sequence of a protein of the present invention is a mature or full-length native sequence comprising amino acids encompassing the N-terminus to the C-terminus of the known sequence.

[0601] A “variant polypeptide” means an active polypeptide as defined herein having at least about 80% amino acid sequence identity with the amino acid sequence of the protein in Table 1. Such identity can be to the residues of the full-length polypeptide or to a specifically derived fragment of the amino acid sequence of the protein. Such variant polypeptides include, for instance, polypeptides wherein one or more amino acid residues are added, or deleted, at the N- and/or C-terminus, as well as within one or more internal domains of each amino acid sequence. Ordinarily, a variant polypeptide will have at least about 80% amino acid sequence identity, more preferably at least about 81% amino acid sequence identity, more preferably at least about 82% amino acid sequence identity, more preferably at least about 83% amino acid sequence identity, more preferably at least about 84% amino acid sequence identity, more preferably at least about 85% amino acid sequence identity, more preferably at least about 86% amino acid sequence identity, more preferably at least about 87% amino acid sequence identity, more preferably at least about 88% amino acid sequence identity, more preferably at least about 89% amino acid sequence identity, more preferably at least about 90% amino acid sequence identity, more preferably at least about 91% amino acid sequence identity, more preferably at least about 92% amino acid sequence identity, more preferably at least about 93% amino acid sequence identity, more preferably at least about 94% amino acid sequence identity, more preferably at least about 95% amino acid sequence identity, more preferably at least about 96% amino acid sequence identity, more preferably at least about 97% amino acid sequence identity, more preferably at least about 98% amino acid sequence identity and yet more preferably at least about 99% amino acid sequence identity with either the full-length polypeptide or a specifically derived fragment of the amino acid sequence of the protein shown in Table 1. Variant polypeptides do not encompass the native polypeptide sequence.

[0602] As used herein with respect to the polypeptide sequences, “percent (%) amino acid sequence identity” is defined as the percentage of amino acid residues in a candidate sequence that are identical with the amino acid residues in a protein of the present invention sequence, after aligning the sequences and introducing gaps, if necessary, to achieve the maximum percent sequence identity, and not considering any conservative substitutions as part of the sequence identity. Alignment for purposes of determining percent amino acid sequence identity can be achieved in various ways that are within the skill in the art, for instance, using publicly available computer software such as BLAST, BLAST-2, ALIGN, ALIGN-2 or Megalign (DNASTAR) software. Those skilled in the art can determine appropriate parameters for measuring alignment, including any algorithms needed to achieve maximal alignment over the full-length of the sequences being compared. For purposes herein, however, % amino acid sequence identity values are obtained as described below by using the sequence comparison computer program ALIGN-2. The ALIGN-2 sequence comparison computer program was authored by Genentech, Inc. and the source code has been filed with user documentation in the U.S. Copyright Office, Washington D.C., 20559, where it is registered under U.S. Copyright Registration No. TXU510087. The ALIGN-2 program is publicly available through Genentech, Inc., South San Francisco, Calif. The ALIGN-2 program should be compiled for use on a UNIX operating system, preferably digital UNIX V4.01). All sequence comparison parameters are set by the ALIGN-2 program and do not vary.

[0603] For purposes herein, the % amino acid sequence identity of a given amino acid sequence A to, with, or against a given amino acid sequence B (which can alternatively be phrased as a given amino acid sequence A that has or comprises a certain % amino acid sequence identity to, with, or against a given amino acid sequence B) is calculated as follows: 100 times the fraction X/Y, where X is the number of amino acid residues scored as identical matches by the sequence alignment program ALIGN-2 in that program's alignment of A and B, and where Y is the total number of amino acid residues in B. It will be appreciated by one skilled in the art that where the length of amino acid sequence A is not equal to the length of amino acid sequence B, the % amino acid sequence identity of A to B will not equal the % amino acid sequence identity of B to A.

[0604] Unless specifically stated otherwise, all % amino acid sequence identity values used herein are obtained as described above using the ALIGN-2 sequence comparison computer program. However, % amino acid sequence identity can also be determined using the sequence comparison program NCBI-BLAST2 (Altschul et al., Nucleic Acids Res. 25:3389-3402 (1997)). The NCBI-BLAST2 sequence comparison program can be downloaded from http://www.ncbi.nlm.nih.gov. NCBI-BLAST2 uses several search parameters, wherein all of those search parameters are set to default values including, for example, unmask=yes, strand=all, expected occurrences=10, minimum low complexity length=1515, multi-pass e-value=0.01, constant for multi-pass=25, dropoff for final gapped alignment=25 and scoring matrix=BLOSUM62.

[0605] In situations where NCBI-BLAST2 is employed for amino acid sequence comparisons, the % amino acid sequence identity of a given amino acid sequence A to, with, or against a given amino acid sequence B (which can alternatively be phrased as a given amino acid sequence A that has or comprises a certain % amino acid sequence identity to, with, or against a given amino acid sequence B) is calculated as follows: 100 times the fraction X/Y, where X is the number of amino acid residues scored as identical matches by the sequence alignment program NCBI-BLAST2 in that program's alignment of A and B, and where Y is the total number of amino acid residues in B. It will be appreciated that where the length of amino acid sequence A is not equal to the length of amino acid sequence B, the % amino acid sequence identity of A to B will not equal the % amino acid sequence identity of B to A.

[0606] “Variant polynucleotide” or “variant nucleic acid sequence” means a nucleic acid molecule which encodes an active polypeptide, as defined herein, and which has at least about 80% nucleic acid sequence identity with either (a) a nucleic acid sequence which encodes residues comprising the known reading frame of the nucleic acid coding for the polypeptide shown in Table 1, or (b) a nucleic acid sequence which encodes another specifically derived fragment of the amino acid sequence shown in Table 1. Ordinarily, a variant polynucleotide will have at least about 80% nucleic acid sequence identity, more preferably at least about 81% nucleic acid sequence identity, more preferably at least about 82% nucleic acid sequence identity, more preferably at least about 83% nucleic acid sequence identity, more preferably at least about 84% nucleic acid sequence identity, more preferably at least about 85% nucleic acid sequence identity, more preferably at least about 86% nucleic acid sequence identity, more preferably at least about 87% nucleic acid sequence identity, more preferably at least about 88% nucleic acid sequence identity, more preferably at least about 89% nucleic acid sequence identity, more preferably at least about 90% nucleic acid sequence identity, more preferably at least about 91% nucleic acid sequence identity, more preferably at least about 92% nucleic acid sequence identity, more preferably at least about 93% nucleic acid sequence identity, more preferably at least about 94% nucleic acid sequence identity, more preferably at least about 95% nucleic acid sequence identity, more preferably at least about 96% nucleic acid sequence identity, more preferably at least about 97% nucleic acid sequence identity, more preferably at least about 98% nucleic acid sequence identity and yet more preferably at least about 99% nucleic acid sequence identity with either (a) a nucleic acid sequence which encodes all residues of the polypeptide shown in Table 1, or (b) a nucleic acid sequence which encodes another specifically derived fragment of the amino acid sequence shown in Table 1. Polynucleotide variants do not encompass the native nucleotide sequence.

[0607] “Percent (%) nucleic acid sequence identity” with respect to the polypeptide encoding nucleic acid sequences identified herein is defined as the percentage of nucleotides in a candidate sequence that are identical with the nucleotides in a polypeptide-encoding nucleic acid sequence, after aligning the sequences and introducing gaps, if necessary, to achieve the maximum percent sequence identity. Alignment for purposes of determining percent nucleic acid sequence identity can be achieved in various ways that are within the skill in the art, for instance, using publicly available computer software such as BLAST, BLAST-2, ALIGN, ALIGN-2 or Megalign (DNASTAR) software. Those skilled in the art can determine appropriate parameters for measuring alignment, including any algorithms needed to achieve maximal alignment over the full-length of the sequences being compared. For purposes herein, however, % nucleic acid sequence identity values are obtained as described below by using the sequence comparison computer program ALIGN-2. The ALIGN-2 sequence comparison computer program was authored by Genentech, Inc., and the source code has been filed with user documentation in the U.S. Copyright Office, Washington D.C., 20559, where it is registered under U.S. Copyright Registration No. TXU510087. The ALIGN-2 program is publicly available through Genentech, Inc., South San Francisco, Calif. The ALIGN-2 program should be compiled for use on a UNIX operating system, preferably digital UNIX V4.01). All sequence comparison parameters are set by the ALIGN-2 program and do not vary.

[0608] For purposes herein, the % nucleic acid sequence identity of a given nucleic acid sequence C to, with, or against a given nucleic acid sequence D (which can alternatively be phrased as a given nucleic acid sequence C that has or comprises a certain % nucleic acid sequence identity to, with, or against a given nucleic acid sequence D) is calculated as follows: 100 times the fraction W/Z, where W is the number of nucleotides scored as identical matches by the sequence alignment program ALIGN-2 in that program's alignment of C and D, and where Z is the total number of nucleotides in D. It will be appreciated that where the length of nucleic acid sequence C is not equal to the length of nucleic acid sequence D, the % nucleic acid sequence identity of C to D will not equal the % nucleic acid sequence identity of D to C.

[0609] Unless specifically stated otherwise, all % nucleic acid sequence identity values used herein are obtained as described above using the ALIGN-2 sequence comparison computer program. However, % nucleic acid sequence identity can also be determined using the sequence comparison program NCBI-BLAST2 (Altschul et al., Nucleic Acids Res. 25:33893402 (1997)). The NCBI-BLAST2 sequence comparison program can be downloaded from http://www.ncbi.nlm.nih.gov. NCBI-BLAST2 uses several search parameters, wherein all of those search parameters are set to default values including, for example, unmask=yes, strand=all, expected occurrences=10, minimum low complexity length=15/5, multi-pass e-value=0.01, constant for multi-pass=25, dropoff for final gapped alignment=25 and scoring matrix=BLOSUM62.

[0610] In situations where NCBI-BLAST2 is employed for sequence comparisons, the % nucleic acid sequence identity of a given nucleic acid sequence C to, with, or against a given nucleic acid sequence D (which can alternatively be phrased as a given nucleic acid sequence C that has or comprises a certain % nucleic acid sequence identity to, with, or against a given nucleic acid sequence D) is calculated as follows: 100 times the fraction W/Z, where W is the number of nucleotides scored as identical matches by the sequence alignment program NCBIBLAST2 in that program's alignment of C and D, and where Z is the total number of nucleotides in D. It will be appreciated that where the length of nucleic acid sequence C is not equal to the length of nucleic acid sequence D, the % nucleic acid sequence identity of C to D will not equal the % nucleic acid sequence identity of D to C.

[0611] In other embodiments, variant polynucleotides are nucleic acid molecules that encode an active polypeptide and which are capable of hybridizing, preferably under stringent hybridization and wash conditions, to nucleotide sequences encoding the full-length polypeptide shown in Table 1. Variant polypeptides can be those that are encoded by a variant polynucleotide.

[0612] The term “conservative”, in the context of the amino acid sequence identity comparisons performed as described above, includes amino acid residues that have similar properties. Preferred conservative substitutions are shown in Table 2.

TABLE 2

| Original | Exemplary | Preferred |
|---|---|---|
| Residue | Substitutions | Substitutions |
| Ala (A) | val; leu; ile | val |
| Arg (R) | lys; gln; asn | lys |
| Asn (N) | gln; his; lys; arg | gln |
| Asp (D) | glu | glu |
| Cys (C) | ser | ser |
| Gln (Q) | asn | asn |
| Glu (E) | asp | asp |
| Gly (G) | pro; ala | ala |
| His (H) | asn; gln; lys; arg | arg |
| Ile (I) | leu; val; met; ala; phe; norleucine | leu |
| Leu (L) | norleucine; ile; val; met; ala; phe | ile |
| Lys (K) | arg; gln; asn | arg |
| Met (M) | leu; phe; ile | leu |
| Phe (F) | leu; val; ile; ala; tyr | leu |
| Pro (P) | ala | ala |
| Ser (S) | thr | thr |
| Thr (T) | ser | ser |
| Trp (W) | tyr; phe | tyr |
| Tyr (Y) | trp; phe; thr; ser | phe |
| Val (V) | ile; leu; met; phe; ala; norleucine | leu |

[0613] For purposes herein, the % value of positives of a given amino acid sequence A to, with, or against a given amino acid sequence B (which can alternatively be phrased as a given amino acid sequence A that has or comprises a certain % positives to, with, or against a given amino acid sequence B) is calculated as follows: 100 times the fraction VY, where X is the number of amino acid residues scoring a positive value as defined above by the sequence alignment program ALIGN-2 in that program's alignment of A and B, and where Y is the total number of amino acid residues in B. It will be appreciated that where the length of amino acid sequence A is not equal to the length of amino acid sequence B, the % positives of A to B will not equal the % positives of B to A.

[0614] The term “isolated,” when used to describe the various polypeptides disclosed herein, means polypeptide that has been identified and separated and/or recovered from a component of its natural environment. Preferably, the isolated polypeptide is free of association with all components with which it is naturally associated. Contaminant components of its natural environment are materials that would typically interfere with diagnostic or therapeutic uses for the polypeptide, and can include enzymes, hormones, and other proteinaceous or non-proteinaceous solutes. In preferred embodiments, the polypeptide will be purified (1) to a degree sufficient to obtain at least 15 residues of N-terminal or internal amino acid sequence by use of a spinning cup sequenator, or (2) to homogeneity by SDS-PAGE under non-reducing or reducing conditions using Coomassie blue or, preferably, silver stain. Isolated polypeptide includes polypeptide in situ within recombinant cells, since at least one component of the protein natural environment will not be present. Ordinarily, however, isolated polypeptide will be prepared by at least one purification step.

[0615] An “isolated” nucleic acid molecule encoding a polypeptide is a nucleic acid molecule that is identified and separated from at least one contaminant nucleic acid molecule with which it is ordinarily associated in the natural source of the nucleic acid. Preferably, the isolated nucleic is free of association with all components with which it is naturally associated. An isolated nucleic acid molecule is one that is other than in the form or setting in which it is found in nature. Isolated nucleic acid molecules therefore are distinguished from nucleic acid molecules as they exist in natural cells. However, an isolated nucleic acid molecule encoding a polypeptide includes nucleic acid molecules contained in cells that ordinarily express polypeptides where, for example, the nucleic acid molecule is in a chromosomal location different from that of natural cells.

[0616] The term “control sequences” refers to DNA sequences necessary for the expression of an operably linked coding sequence in a particular host organism. The control sequences that are suitable for prokaryotes, for example, include a promoter, optionally an operator sequence, and a ribosome-binding site. Additionally, eukaryotic cells are known to utilize promoters, polyadenylation signals, and enhancers.

[0617] A nucleic acid is “operably linked” when it is placed into a functional relationship with another nucleic acid sequence. For example, DNA for a presequence or secretory leader is operably linked to DNA for a polypeptide if it is expressed as a preprotein that participates in the secretion of the polypeptide; a promoter or enhancer is operably linked to a coding sequence if it affects the transcription of the sequence; or a ribosome binding site is operably linked to a coding sequence if it is positioned so as to facilitate translation. Generally, “operably linked” means that the DNA sequences being linked are contiguous, and, in the case of a secretory leader, contiguous and in reading phase. However, enhancers do not have to be contiguous. Linking is accomplished by ligation at convenient restriction sites. If such sites do not exist, the synthetic oligonucleotide adaptors or linkers are used in accordance with conventional practice.

[0618] The term “antibody” is used in the broadest sense and specifically covers, for example, single monoclonal antibodies (including agonist, antagonist, and neutralizing antibodies), antibody compositions with polyepitopic specificity, single chain antibodies, and fragments of antibodies. The term “monoclonal antibody” as used herein refers to an antibody obtained from a population of substantially homogeneous antibodies, i.e., the individual antibodies comprising the population are identical except for possible naturally occurring mutations that can be present in minor amounts. The “stringency” of hybridization reactions is readily determinable by one of ordinary skill in the art, and generally is an empirical calculation dependent upon probe length, washing temperature, and salt concentration. In general, longer probes require higher temperatures for proper annealing, while shorter probes need lower temperatures. Hybridization generally depends on the ability of denatured DNA to reanneal when complementary strands are present in an environment below their melting temperature. The higher the degree of desired homology between the probe and hybridizable sequence, the higher the relative temperature, which can be used. As a result, it follows that higher relative temperatures would tend to make the reaction conditions more stringent, while lower temperatures less so. For additional details and explanation of stringency of hybridization reactions, see Ausubel et al., Current Protocols in Molecular Biology, Wiley Interscience Publishers, (1995).

[0619] “Stringent conditions” or “high stringency conditions”, as defined herein, can be identified by those that: (1) employ low ionic strength and high temperature for washing, for example 0.015 M sodium chloride/0.0015 M sodium citrate/0.1% sodium dodecyl sulfate at 50° C.; (2) employ during hybridization a denaturing agent, such as formamide, for example, 50% (v/v) formamide with 0.1% bovine serum albumin/0.1% Ficoll/0.1% polyvinylpyrrolidone/50 mM sodium phosphate buffer at pH 6.5 with 750 mM sodium chloride, 75 mM sodium citrate at 42° C.; or (3) employ 50% formamide, 5×SSC (0.75 M NaCl, 0.075 M sodium citrate), 50 mM sodium phosphate (pH 6.8), 0.1% sodium pyrophosphate, 5× Denhardt's solution, sonicated salmon sperm DNA (50 μg/ml), 0.1% SDS, and 10% dextran sulfate at 42° C., with washes at 42° C. in 0.2×SSC (sodium chloride/sodium citrate) and 50% formamide at 55° C., followed by a high-stringency wash consisting of 0.1×SSC containing EDTA at 55° C.

[0620] “Active” or “activity” for the purposes herein refers to form(s) of polypeptide which retain a biological and/or an immunological activity of native or naturally-occurring polypeptide, wherein “biological” activity refers to a biological function (either inhibitory or stimulatory), which includes enzymatic activity, caused by a native or naturally-occurring polypeptide other than the ability to induce the production of an antibody against an antigenic epitope possessed by a native or naturally-occurring polypeptide and an “immunological” activity refers to the ability to induce the production of an antibody against an antigenic epitope possessed by a native or naturally-occurring polypeptide. A preferred biological activity includes, for example, the property of the polypeptide to degrade extracellular matrix as for example in the case of proteases discovered to do so described in this invention.

[0621] The term “antagonist” is used in the broadest sense, and includes any molecule that partially or fully blocks, inhibits, or neutralizes a biological activity of a native polypeptide disclosed herein. In a similar manner, the term “agonist” is used in the broadest sense and includes any molecule that mimics a biological activity of a native polypeptide disclosed herein. Suitable agonist or antagonist molecules specifically include agonist or antagonist antibodies or antibody fragments, fragments or amino acid sequence variants of native polypeptides, peptides, antisense molecules, and small organic molecules. Methods for identifying agonists or antagonists of a polypeptide include contacting a polypeptide, mRNA or gene with a candidate agonist or antagonist molecule and measuring a detectable change in one or more biological activities normally associated with the polypeptide.

[0622] “Treatment” refers to both therapeutic treatment and prophylactic or preventative measures, wherein the object is to prevent or slow down (lessen) the targeted pathologic condition or disorder. More specifically, “treatment” is an intervention performed with the intention of preventing the development or altering the pathology of a cancerous disorder. The concept of treatment is used in the broadest sense, and specifically includes the prevention (prophylaxis), moderation, reduction, and curing of cancerous disorders of any stage. Accordingly, “treatment” refers to both therapeutic treatment and prophylactic or preventative measures, wherein the object is to prevent or slow down (lessen) a cancerous disorder. The disorder may result from any cause. Subjects in need of treatment include those already with the disorder as well as those susceptible to the disorder or those in whom the disorder needs to be prevented.

[0623] “Chronic” administration refers to administration of the agent(s) in a continuous mode as opposed to an acute mode, so as to maintain the initial therapeutic effect (activity) for an extended period of time.

[0624] “Intermittent” administration is treatment that is not consecutively done without interruption, but rather is cyclic in nature.

[0625] “Microarray” refers to an array of distinct polynucleotides or oligonucleotides arranged on a substrate such as paper, nylon, or other type of membrane, filter, gel, polymer, chip, glass slide, or any other suitable support, including solid supports. The polynucleotides or oligonucleotides (the backbone chemistry can be any available in the art) can be synthesized on a substrate or prepared before application to the substrate.

[0626] Administration “in combination with” one or more further therapeutic agents includes both simultaneous (concurrent) and consecutive administration in any order of one or more therapeutic agents.

[0627] “Carriers” as used herein include pharmaceutically acceptable carriers, excipients, or stabilizers, which are nontoxic to the cell or mammal being exposed thereto at the dosages and concentrations, employed. Often the physiologically acceptable carrier is an aqueous pH buffered solution. Examples of physiologically acceptable carriers include buffers such as phosphate, citrate, and other organic acids; antioxidants including ascorbic acid; low molecular weight (i.e., less than about 10 residues) polypeptide; proteins, such as serum albumin, gelatin, or immunoglobulins; hydrophilic polymers such as polyvinylpyrrolidone; amino acids such as glycine, glutamine, asparagine, arginine or lysine; monosaccharides, disaccharides, and other carbohydrates including glucose, mannose, or dextrins; chelating agents such as EDTA; sugar alcohols such as mannitol or sorbitol; lipids such as cationic lipids, salt-forming counterions such as sodium; and/or nonionic surfactants such as TWEEN™. polyethylene glycol (PEG), and PLURONICS™.

[0628] “Antibody fragments” comprise a portion of an intact antibody, preferably the antigen binding or variable region of the intact antibody. Examples of antibody fragments include Fab, Fab′, F(ab′)₂, and Fv fragments; diabodies; linear antibodies (see Zapata et al., Protein Eng. 8(10): 1057-1062 (1995)); single-chain antibody molecules; and multispecific antibodies formed from antibody fragments.

[0629] Papain digestion of antibodies produces two identical antigen-binding fragments, called “Fab” fragments, each with a single antigen-binding site, and a residual “fc” fragment, a designation reflecting the ability to crystallize readily. Pepsin treatment yields an F(ab′)₂ fragment that has two antigen-combining sites and is still capable of cross-linking antigen.

[0630] “Fv” is the minimum antibody fragment that contains a complete antigen-recognition and antigen-binding site. This region consists of a dimer of one heavy- and one light-chain variable domain in tight, non-covalent association. It is in this configuration that the three CDRs of each variable domain interact to define an antigen-binding site on the surface of the VH-VL dimer. Collectively, the six CDRs confer antigen-binding specificity to the antibody. However, even a single variable domain (or half of an Fv comprising only three CDRs specific for an antigen) has the ability to recognize and bind antigen, although at a lower affinity than the entire binding site.

[0631] The Fab fragment also contains the constant domain of the light chain and the first constant domain (CHI) of the heavy chain. Fab fragments differ from Fab′ fragments by the addition of a few residues at the carboxy terminus of the heavy chain CH1 domain including one or more cysteines from the antibody hinge region. Fab-SH is the designation herein for Fab′ in which the cysteine residue(s) of the constant domains bear a free thiol group. F(ab′)₂ antibody fragments originally were produced as pairs of Fab′ fragments which have hinge cysteines between them. Other chemical couplings of antibody fragments are also known to one of ordinary skill in the art.

[0632] The “light chains” of antibodies (immunoglobulins) from any vertebrate species can be assigned to one of two clearly distinct types, called kappa and lambda, based on the amino acid sequences of their constant domains.

[0633] Depending on the amino acid sequence of the constant domain of their heavy chains, immunoglobulins can be assigned to different classes. There are five major classes of immunoglobulins: IgA, IgD, IgE, IgG, and IgM, and several of these can be further divided into subclasses (isotypes), e.g., IgG1, IgG2, IgG3, IgG4, IgA, and IgA2.

[0634] “Single-chain Fv” or “sFv” antibody fragments comprise the VH and VL domains of antibody, wherein these domains are present in a single polypeptide chain. Preferably, the Fv polypeptide further comprises a polypeptide linker between the VH and VL domains, which enables the sFv to form the desired structure for antigen binding. For a review of sFv, see Pluckthun in The Pharmacology of Monoclonal Antibodies, vol. 113, Rosenburg and Moore eds., Springer-Verlag, New York, pp. 269-315 (1994).

[0635] The term “diabodies” refers to small antibody fragments with two antigen-binding sites, which fragments comprise a heavy-chain variable domain (VH) connected to a light chain variable domain (VL) in the same polypeptide chain (VH-VL). By using a linker that is too short to allow pairing between the two domains on the same chain, the domains are forced to pair with the complementary domains of another chain and create two antigen-binding sites. Diabodies are described more fully in, for example, EP 404,097; WO 93/11161; and Hollinger et al., Proc. Natl. Acad. Sci. USA, 90:6444-6448 (1993).

[0636] An “isolated” antibody is one that has been identified and separated and/or recovered from a component of its natural environment. Contaminant components of its natural environment are materials, which would interfere with diagnostic or therapeutic uses for the antibody, and can include enzymes, hormones, and other proteinaceous or non-proteinaceous solutes. In preferred embodiments, the antibody will be purified (1) to greater than 95% by weight of antibody as determined by the Lowry method, and most preferably more than 99% by weight, (2) to a degree sufficient to obtain at least 15 residues of N-terminal or internal amino acid sequence by use of a spinning cup sequenator, or (3) to homogeneity by SDS-PAGE under reducing or nonreducing conditions using Coomassie blue or, preferably, silver stain. Isolated antibody includes the antibody in situ within recombinant cells since at least one component of the antibody's natural environment will not be present, Ordinarily, however, isolated antibody will be prepared by at least one purification step.

[0637] The word “label”, when used herein, refers to a detectable compound or composition, which is conjugated directly or indirectly to the antibody so as to generate a “labeled” antibody. The label can be detectable by itself (e.g. radioisotope labels or fluorescent labels) or, in the case of an enzymatic label, can catalyze chemical alteration of a substrate compound or composition, which is detectable.

[0638] By “solid phase” is meant a non-aqueous matrix to which the antibody of the present invention can adhere. Examples of solid phases encompassed herein include those formed partially or entirely of glass (e.g., controlled pore glass), polysaccharides (e.g., agarose), polyacrylamides, polystyrene, polyvinyl alcohol and silicones. In certain embodiments, depending on the context, the solid phase can comprise the well of an assay plate; in others it is a purification column (e.g., an affinity chromatography column). This term also includes a discontinuous solid phase of discrete particles, such as those described in U.S. Pat. No. 4,275,149.

[0639] As used herein, the terms “cancer” or “cancerous” refer to or describe the physiological conditions in mammals that are typically characterized by unregulated cell growth. This can include benign growth, pre-malignant growth or malignant growth wherein the cells of the primary growth have spread to other sites. As used herein, the terms include any neoplasia, described as “an abnormal mass of tissue, the growth of which exceeds and is uncoordinated with that of the normal tissues and persists in the same excessive manner after cessation of the stimuli which evoke the change.” (referenced in Robbins, S. L. Pathologic Basis of Disease, W. B. Saunders Co. 1974). Examples of cancers include but are not limited to, carcinomas including adenocarcinoma, lymphoma, blastoma, melanoma, sarcoma, and leukemia. More particular examples of such cancers include squamous cell cancer, small-cell lung cancer, non-small cell lung cancer, gastrointestinal cancer, Hodgkin's and non-Hodgkin's lymphoma, pancreatic cancer, glioblastoma, cervical cancer, ovarian cancer, liver cancers such as hepatic carcinoma and hepatoma, bladder cancer, breast cancer, colon cancer, colorectal cancer, endometrial carcinoma, salivary gland carcinoma, kidney cancer such as renal cell carcinoma and Wilms' tumors, basal cell carcinoma, melanoma, prostate cancer, vulval cancer, thyroid cancer, testicular cancer, esophageal cancer, and various types of head and neck cancer. The preferred cancers for treatment according to the methods of the invention described herein are breast, colon, lung, melanoma, ovarian, and prostate cancer.

[0640] The term “cytotoxic agent” as used herein refers to a substance that inhibits or prevents the function of cells and/or causes destruction of cells. The term is intended to include radioactive isotopes (e.g., ¹³¹I, ¹²⁵I, ⁹⁰Y, and ¹⁸⁶Re), chemotherapeutic agents, and toxins such as enzymatically active toxins of bacterial, fungal, plant, or animal origin, or fragments thereof.

[0641] A “chemotherapeutic agent” is a chemical compound useful in the treatment of cancer. Examples of chemotherapeutic agents include alkylating agents, folic acid antagonists, anti-metabolites of nucleic acid metabolism, antibiotics, pyrimidine analogs, 5-fluorouracil, cisplatin, purine nucleosides, amines, amino acids, triazol nucleosides, or corticosteroids. Specific examples include Adriamycin, Doxorubicin, 5-Fluorouracil, Cytosine arabinoside (“Ara-C”), Cyclophosphamide, Thiotepa, Busulfan, Cytoxin, Taxol, Toxotere, Methotrexate, Cisplatin, Melphalan, Vinblastine, Bleomycin, Etoposide, Ifosfamide, Mitomycin C, Mitoxantrone, Vinblastine, Vinorelbine, Carboplatin, Teniposide, Daunomycin, Carminomycin, Aminopterin, Dactinomycin, Mitomycins, Esperamicins (See U.S. Pat. No. 4,675,187), Melphalan, and other related nitrogen mustards. Also included in this definition are hormonal agents that act to regulate or inhibit hormone action on tumors, such as tamoxifen and onapristone.

[0642] “Growth-inhibitory agent” when used herein refers to a compound or composition that inhibits growth of a cell, such as a Wnt-overexpressing cancer cell, either in vitro or in vivo. Thus, a growth-inhibitory agent is one that significantly reduces the percentage of malignant cells in S phase. Examples of growth-inhibitory agents include agents that block cell cycle progression (at a place other than S phase), such as agents that induce G1 arrest and M-phase arrest. Classical M-phase blockers include the vincas (vincristine and vinblastine), taxol, and topo II inhibitors such as doxorubicin, daunorubicin, etoposide, and bleomycin. Those agents that arrest G1 also spill over into S-phase arrest, for example, DNA alkylating agents such as tamoxifen, prednisone, dacarbazine, mechlorethamine, cisplatin, methotrexate, 5-fluorouracil, and ara-C. Further information on growth-inhibitory agents can be found in The Molecular Basis of Cancer, Mendelsohn and Israel, eds., Chapter 1, entitled “Cell cycle regulation, oncogenes, and antineoplastic drugs” by Murakami et al., (VVB Saunders: Philadelphia, 1995), p. 13. Additional examples include tumor necrosis factor (TNF), an antibody capable of inhibiting or neutralizing the angiogenic activity of acidic or basic FGF or hepatocyte growth factor (HGF), an antibody capable of inhibiting or neutralizing the coagulant activities of tissue factor, protein C, or protein S (see, WO 91/01753, published 21 Feb. 1991), or an antibody capable of binding to HER2 receptor (WO 89/06692), such as the 4D5 antibody (and functional equivalents thereof) (e.g., WO 92/22653).

[0643] In a pharmacological sense, in the context of the present invention, a “therapeutically effective amount” of an active agent such as a polypeptide or agonist or antagonist thereto or an antibody, refers to an amount effective in the treatment of a cancerous disorder in a mammal and can be determined empirically. Determination of a therapeutically effective amount can be accomplished by any method known to those skilled in the art.

[0644] As used herein, an “effective amount” of an active agent such as a polypeptide or agonist or antagonist thereto or an antibody, refers to an amount effective for carrying out a stated purpose, wherein such amounts may be determined empirically for the desired effect.

[0645] The herein described nucleic acids, polypeptides, antibodies, agonists, and antagonists, when used therapeutically are referred to herein as “Therapeutics”. Methods of administration of therapeutics include, but are not limited to, intradermal, intramuscular, intraperitoneal, intravenous, subcutaneous, intranasal, epidural, and oral routes. The therapeutics of the present invention may be administered by any convenient route, for example by infusion or bolus injection, by absorption through epithelial or mucocutaneous linings (e.g., oral mucosal, rectal and intestinal mucosal, etc.) and may be administered together with other biologically-active agents. Administration can be systemic or local. In addition, it may be advantageous to administer the therapeutic into the central nervous system by any suitable route, including intraventricular and intrathecal injection.

[0646] Intraventricular injection may be facilitated by an intraventricular catheter attached to a reservoir (e.g., an Ommaya reservoir). Pulmonary administration may also be employed by use of an inhaler or nebulizer, and formulation with an aerosolizing agent. It may also be desirable to administer the therapeutic locally to the area in need of treatment; this may be achieved by, for example, and not by way of limitation, local infusion during surgery, topical application, by injection, by means of a catheter, by means of a suppository, or by means of an implant. In a specific embodiment, administration may be by direct injection at the site (or former site) of a malignant tumor or neoplastic or pre-neoplastic tissue.

[0647] Various delivery systems are known and can be used to administer a therapeutic of the present invention including, e.g.: (i) encapsulation in liposomes, microparticles, microcapsules; (ii) recombinant cells capable of expressing the therapeutic; (iii) receptor mediated endocytosis (See, e.g., Wu and Wu, 1987. J Biol Chem 262:4429-4432); (iv) construction of a therapeutic nucleic acid as part of a retroviral or other vector, and the like.

[0648] In one embodiment of the present invention, the therapeutic may be delivered in a vesicle, in particular a liposome. In a liposome, the protein of the present invention is combined, in addition to other pharmaceutically acceptable carriers, with amphipathic agents such as lipids, which exist in aggregated form as micelles, insoluble monolayers, liquid crystals, or lamellar layers in aqueous solution. Suitable lipids for liposomal formulation include, without limitation, monoglycerides, diglycerides, sulfatides, lysolecithin, phospholipids, saponin, bile acids, and the like. Preparation of such liposomal formulations is within the level of skill in the art, as disclosed, for example, in U.S. Pat. No. 4,837,028; and U.S. Pat. No. 4,737,323, all of which are incorporated herein by reference.

[0649] In yet another embodiment, the therapeutic can be delivered in a controlled release system including, e.g.: a delivery pump (See, e.g., Saudek, et al., 1989. New Engl J Med 321:574 and a semi-permeable polymeric material (See, e.g., Howard, et al., 1989. J Neurosurg 71:105). Additionally, the controlled release system can be placed in proximity of the therapeutic target (e.g., the brain), thus requiring only a fraction of the systemic dose. See, e.g., Goodson, In: Medical Applications of Controlled Release 1984. (CRC Press, Bocca Raton, Fla.).

[0650] In a specific embodiment of the present invention, where the therapeutic is a nucleic acid encoding a protein, the therapeutic nucleic acid may be administered in vivo to promote expression of its encoded protein, by constructing it as part of an appropriate nucleic acid expression vector and administering it so that it becomes intracellular (e.g., by use of a retroviral vector, by direct injection, by use of microparticle bombardment, by coating with lipids or cell-surface receptors or transfecting agents, or by administering it in linkage to a homeobox-like peptide which is known to enter the nucleus (See, e.g., Joliot, et al., 1991. Proc Natl Acad Sci USA 88:1864-1868), and the like. Alternatively, a nucleic acid therapeutic can be introduced intracellularly and incorporated within host cell DNA for expression, by homologous recombination.

[0651] As used herein, the term “therapeutically effective amount” means the total amount of each active component of the pharmaceutical composition or method that is sufficient to show a meaningful patient benefit, i.e., treatment, healing, prevention or amelioration of the relevant medical condition, or an increase in rate of treatment, healing, prevention or amelioration of such conditions. When applied to an individual active ingredient, administered alone, the term refers to that ingredient alone. When applied to a combination, the term refers to combined amounts of the active ingredients that result in the therapeutic effect, whether administered in combination, serially or simultaneously.

[0652] The amount of the therapeutic of the invention which will be effective in the treatment of a particular disorder or condition will depend on the nature of the disorder or condition, and may be determined by standard clinical techniques by those of average skill within the art. In addition, in vitro assays may optionally be employed to help identify optimal dosage ranges. The precise dose to be employed in the formulation will also depend on the route of administration, and the overall seriousness of the disease or disorder, and should be decided according to the judgment of the practitioner and each patient's circumstances. Ultimately, the attending physician will decide the amount of protein of the present invention with which to treat each individual patient. Initially, the attending physician will administer low doses of protein of the present invention and observe the patient's response. Larger doses of protein of the present invention may be administered until the optimal therapeutic effect is obtained for the patient, and at that point the dosage is not increased further. However, suitable dosage ranges for intravenous administration of the therapeutics of the present invention are generally about 20-500 micrograms (μg) of active compound per kilogram (Kg) body weight. Suitable dosage ranges for intranasal administration are generally about 0.01 μg/kg body weight to 1 mg/kg body weight. Effective doses may be extrapolated from dose-response curves derived from in vitro or animal model test systems. Suppositories generally contain active ingredient in the range of 0.5% to 10% by weight; oral formulations preferably contain 10% to 95% active ingredient.

[0653] The duration of intravenous therapy using the pharmaceutical composition of the present invention will vary, depending on the severity of the disease being treated and the condition and potential idiosyncratic response of each individual patient. It is contemplated that the duration of each application of the protein of the present invention will be in the range of 12 to 24 hours of continuous intravenous administration. Ultimately the attending physician will decide on the appropriate duration of intravenous therapy using the pharmaceutical composition of the present invention.

[0654] Unless otherwise defined, all technical and scientific terms used herein have the same meaning as commonly understood by one of ordinary skill in the art to which this invention pertains. In case of conflict, the present specification, including definitions, will control. In addition, the materials, methods, and examples are illustrative only and are not intended to be limiting. Although methods and materials similar or equivalent to those described herein can be used in the practice or testing of the present invention, suitable methods and materials are described below.

[0655] All commercially available reagents referred to in the examples were used according to manufacturer's instructions unless otherwise indicated. The source of those cells identified by ATCC accession numbers in the following examples, and throughout the specification, is the American Type Culture Collection, Manassas, Va.

[0656] All publications, patent applications, patents, and other references mentioned herein are incorporated by reference in their entirety.

[0657] The invention will be further described in the following examples, which do not limit the scope of the invention described in the claims. The following examples are offered for illustrative purposes only, and are not intended to limit the scope of the present invention in any way.

### EXAMPLES

### Example 1

[0658] Sample Preparation

[0659] Total RNA was isolated from 10 primary colon tumors and 10 normal colon samples using the Ambion Totally RNA kit for isolation of total cellular RNA, catalog number #1910, 2130 Woodward Street, Austin, Tex. 78744-1832. According to the protocol the samples were lysed in a guanidinium based lysis solution and were then extracted sequentially with a Phenol:Chloroform:IAA and Acid-Phenol:Chloroform. The RNA is then precipitated with isopropanol. Poly A+ RNA was extracted using the Oligotex mRNA midi kit, catalog number #70042, 28159 Avenue Stanford, Valencia, Calif., 91355. Using this kit the poly A+ RNA was purified by hybridizing the poly A+ tail to a dT oligomer coupled to a solid-phase matrix.

### Example 2

[0660] Probe Generation

[0661] Each polyA⁺ RNA sample was reverse transcribed using MMLV reverse-transcriptase, 0.05 μg/ul oligo-dT primer (21 mer), 1× first strand buffer, 0.03 units/ul RNase inhibitor, 500 uM dATP, 500 uM dGTP, 500 uM dTTP, 40 uM dCTP, 40 uM dCTP-Cy3 (BDS) or dCTP-Cy5 (Amersham Pharmacia Biotech). The reverse transcription reaction was performed in a 25 ml volume containing 200 ng polyA⁺ RNA with GEMBRIGHT kits. Specific control polyA⁺ RNAs (YCFR06, YCFR45, YCFR67, YCFR85, YCFR43, YCFR22, YCFR23, YCFR25, YCFR44, YCFR26) were synthesized by in vitro transcription from non-coding yeast genomic DNA (W. Lei, unpublished). As quantitative controls, the control mRNAs (YCFR06, YCFR45, YCFR67, YCFR85) at 0.002 ng, 0.02 ng, 0.2 ng, and 2 ng were diluted into reverse transcription reaction at ratios of 1:100,000, 1:10,000, 1:1000, 1:100 (w/w) to sample mRNA respectively. The control mRNAs (YCFR43, YCFR22, YCFR23, YCFR25, YCFR44, YCFR26) were diluted into reverse transcription reaction at ratios of 1:3, 3:1, 1:10, 10:1, 1:25, 25:1 (w/w) to sample mRNA differential expression patterns. After incubation at 37° C. for 2 hr, each reaction sample (one with Cy3 and another with Cy5 labeling) was treated with 2.5 ml of 0.5M sodium hydroxide and incubated for 20 minutes at 85° C. to the stop the reaction and degrade the RNA. Probes were purified using two successive CHROMA SPIN 30 gel filtration spin columns (Clontech, Palo Alto, Calif. USA) and after combining, both reaction samples were ethanol precipitated using 1 ml of glycogen (1 mg/ml), 60 ml sodium acetate, and 300 ml of 100% ethanol. The probe was then dried to completion using a SpeedVAC (Savant) and resuspended in 14 ul 5×SSC/0.2% SDS.

### Example 3

[0662] Hybridizaton

[0663] Hybridization reactions contained 9 μl of probe mixture consisting of 0.2 μg each of both Cy3 and Cy5 labeled cDNA synthesis products in 5×SSC, 0.2% SDS hybridization buffer. The probe mixture was heated to 65° C. for 5 minutes and was aliquoted onto the microarray surface and covered with an 1.8 cm² coverslip. The arrays were transferred to a waterproof chamber having a cavity just slightly larger than a microscope slide. The chamber was kept at 100% humidity internally by the addition of 140 μl of 5×SSC in a corner of the chamber. The chamber containing the arrays was incubated for about 6.5 hours at 60° C. The arrays were washed for 10 min at 45° C. in high stringency wash buffer (1×SSC, 0.1% SDS), three times for 10 minutes each at 45° C. in low stringency wash buffer (0.1×SSC), and then dried.

### Example 4

[0664] Detection

[0665] The microscope used to detect the reporter-labeled hybridization complexes was equipped with an Innova 70 mixed gas 10 W laser (Coherent Lasers, Santa Clara, Calif.) capable of generating spectral lines at 488 nm for excitation of Cy3, and 632 nm for excitation of Cy5. The excitation laser light was focused on the array using a 20× microscope objective (Nikon). The slide containing the array was placed on a computer-controlled X-Y stage on the microscope and raster-scanned past the objective. The 1.8 cm×1.8 cm array used in the present example was scanned with a resolution of 20 micrometers.

[0666] In two separate scans, a mixed gas multiline laser excited the two fluorophores sequentially. Emitted light was split, based on wavelength, into two photomultiplier tube detectors (PMT R1477, Hamamatsu Photonics, San Jose, Calif.) corresponding to the two fluorophores. Appropriate filters positioned between the array and the photomultiplier tubes were used to filter the signals. The emission maxima of the fluorophores used were 565 nm for Cy3 and 650 nm for Cy5. Each array was typically scanned twice, one scan per fluorophore using the appropriate filters at the laser source, although the apparatus was capable of recording the spectra from both fluorophores simultaneously.

[0667] The sensitivity of the scans was typically calibrated using the signal intensity generated by a cDNA control species added to the probe mix at a known concentration. A specific location on the array contained a complementary DNA sequence, allowing the intensity of the signal at that location to be correlated with a weight ratio of hybridizing species of 1:100,000. When two probes from different sources (e.g., representing test and control cells), each labeled with a different fluorophore, are hybridized to a single array for the purpose of identifying genes that are differentially expressed, the calibration was done by labeling samples of the calibrating cDNA with the two fluorophores and adding identical amounts of each to the hybridization mixture.

[0668] The output of the photomultiplier tube was digitized using a 12-bit RTI-835H analog-to-digital (A/D) conversion board (Analog Devices, Norwood, Mass.) installed in an IBM-compatible PC computer. The digitized data were displayed as an image where the signal intensity was mapped using a linear 20-color transformation to a pseudocolor scale ranging from blue (low signal) to red (high signal). The data was also analyzed quantitatively. Where two different fluorophores were excited and measured simultaneously, the data were first corrected for optical crosstalk (due to overlapping emission spectra) between the fluorophores using each fluorophore's emission spectrum.

[0669] A grid was superimposed over the fluorescence signal image such that the signal from each spot was centered in each element of the grid. The fluorescence signal within each element was then integrated to obtain a numerical value corresponding to the average intensity of the signal. The software used for signal analysis was the GEMTOOLS gene expression analysis program (Incyte).

### Example 5

[0670] Microarray Analysis

[0671] The analysis of hybridized microarrays is a multi-step procedure. Arrays were run through an initial quality control procedure that determines spot quality. Upon completion, spots passing a set of pre-defined standards were used to balance the Cy3 (tumor) and Cy5 (normal pool) signals for each gene using an internal method of background correction and signal normalization. The balanced signals were then used to calculate the balanced differential expression ratio for each transcript represented. The ratio was calculated as:

$$\begin{matrix}Ratio = \frac{Cy3}{BalancedCy5} & if Cy3 >= Cy5 \\ Ratio = - \frac{BalancedCy5}{Cy3} & if Cy3 < Cy5\end{matrix}$$

[0672] After normalization the arrays were passed through another series of quality control measures, at the array level, to insure confidence in the differential expression values. For arrays passing all quality control measures, a ratio value of 2 fold or greater was accepted as a significant differential both positive and negative ratios. The value of 2 fold was used as it has consistently demonstrated 90%-95% secondary validation rates. In the context of this experiment, a positive ratio indicates an up-regulation of the transcript in the tumor tissue. Transcripts that demonstrate up-regulation in at least 30% of the tumors profiled were identified for further bioinformatic analysis. The differential expression values were quality controlled internally and are shown in Table 3 (up-regulated transcripts) and Table 4 (down-regulated transcripts).

TABLE 3

| | Colon | Colon | Colon | Colon | Colon |
|---|---|---|---|---|---|
| Internal Id | Tumor 1 | Tumor 2 | Tumor 3 | Tumor 4 | Tumor 5 |
| PCTUC_1 | −1.167605 | 3.33153 | 2.21829 | 1.482095 | 2.386943 |
| PCTUC_2 | 3.010309 | 3.331919 | 1.11844 | 2.034488 | 1.618272 |
| PCTUC_3 | 1.024984 | 1.056008 | −1.133479 | −1.434139 | 4.280367 |
| PCTUC_4 | 2.153777 | 3.903957 | 1.664692 | 1.69709 | 3.688466 |
| PCTUC_5 | 2.057309 | 3.513776 | 2.178211 | 1.767936 | 3.360188 |
| PCTUC_6 | 1.434955 | 2.456625 | 1.647487 | 1.257837 | 2.88564 |
| PCTUC_7 | 1.726415 | 6.022513 | 1.97093 | 1.371469 | 1.267824 |
| PCTUC_8 | 3.44923 | 8.567132 | 3.309122 | 1.418101 | 2.207181 |
| PCTUC_9 | −1.24335 | −1.591661 | −1.413795 | 2.313674 | 1.483923 |
| PCTUC_10 | 1.889236 | 2.209288 | 2.358001 | 2.91982 | 1.86346 |
| PCTUC_11 | 1.825643 | 2.982506 | 2.381234 | 1.8578 | 2.436895 |
| PCTUC_12 | 2.29826 | 3.603747 | 2.093798 | 3.73169 | 2.919872 |
| PCTUC_13 | 1.829951 | 2.163258 | 1.540913 | 1.118439 | 2.699494 |
| PCTUC_14 | 2.409517 | 2.765398 | 1.743494 | 2.035633 | 2.988889 |
| PCTUC_15 | 1.774211 | 4.314919 | 3.921481 | 2.014538 | 4.311935 |
| PCTUC_16 | 2.225139 | 4.326321 | 1.919548 | 1.593435 | 3.5661 |
| PCTUC_17 | 1.499352 | 3.324623 | 2.759565 | 1.119117 | 2.112245 |
| PCTUC_18 | 2.446111 | 2.948642 | 1.698977 | 1.715412 | 3.550059 |
| PCTUC_19 | 2.4004 | 3.573775 | 1.950095 | 1.77725 | 3.201406 |
| PCTUC_20 | 1.648393 | 2.617168 | 1.625779 | 1.529432 | 2.786005 |
| PCTUC_21 | 1.298735 | 2.233336 | 1.202361 | 1.422586 | 2.42449 |
| PCTUC_22 | 1.946348 | 3.223213 | 2.01582 | 1.897335 | 3.349705 |
| PCTUC_23 | 1.966244 | 2.633702 | 1.647908 | 1.584596 | 3.069661 |
| PCTUC_24 | 1.612851 | 1.759476 | 1.227302 | 1.212384 | 2.204627 |
| PCTUC_25 | 1.547841 | 3.747698 | 1.780759 | 1.400986 | 3.299834 |
| PCTUC_27 | 1.696275 | 2.027911 | 1.427261 | 1.591907 | 2.715553 |
| PCTUC_28 | 1.734647 | 2.30457 | 1.349411 | 1.609 | 2.535051 |
| PCTUC_29 | 1.218383 | 2.146439 | 1.305923 | 1.36905 | 1.993406 |
| PCTUC_30 | 2.251479 | 4.269543 | 1.869797 | 1.95957 | 4.609859 |
| PCTUC_31 | 1.273212 | 2.008828 | 1.222321 | 1.216924 | 4.79896 |
| PCTUC_32 | 2.211274 | 2.299184 | 1.538199 | 1.846299 | 2.374974 |
| PCTUC_33 | 1.516001 | 2.527318 | 1.163905 | 1.144805 | 3.056935 |
| PCTUC_34 | 1.738326 | 2.761815 | 1.478411 | 1.590443 | 2.763778 |
| PCTUC_35 | 2.450331 | 3.412452 | 2.060661 | 1.893831 | 3.852642 |
| PCTUC_36 | 1.282602 | 2.816709 | 1.325435 | 1.018326 | 1.998563 |
| PCTUC_37 | 2.157884 | 3.047547 | 1.903155 | 1.270211 | 3.594 |
| PCTUC_38 | 2.032504 | 2.527848 | 1.368973 | 1.775121 | 2.579978 |
| PCTUC_39 | 2.057803 | 2.589417 | 1.472552 | 2.317069 | 8.40739 |
| PCTUC_40 | 1.397248 | 1.999109 | 2.080914 | 1.299083 | 2.359739 |
| PCTUC_41 | 2.106049 | 2.4829 | 1.780815 | 1.566652 | 2.513543 |
| PCTUC_42 | 2.11433 | 2.763852 | 1.680019 | 1.171995 | 3.175251 |
| PCTUC_43 | 1.829138 | 4.590826 | 2.386226 | −1.003516 | 1.231775 |
| PCTUC_44 | 1.995429 | 3.195874 | 1.562907 | 1.796879 | 3.65745 |
| PCTUC_45 | 2.476977 | 3.752093 | 2.011098 | 2.046475 | 4.519679 |
| PCTUC_46 | 1.517254 | 1.824735 | 1.121034 | 1.163115 | 2.756811 |
| PCTUC_47 | 1.971729 | 3.51245 | 2.332144 | 3.026521 | 2.137793 |
| PCTUC_48 | 2.66606 | 5.100231 | 2.502615 | 2.33134 | 3.764472 |
| PCTUC_49 | 2.709622 | 4.09865 | 2.081851 | 2.337645 | 5.108332 |
| PCTUC_50 | 1.657113 | 2.514183 | 1.208705 | 1.449126 | 2.884126 |
| PCTUC_51 | 1.961473 | 2.348377 | 1.406842 | 1.547914 | 2.674841 |
| PCTUC_52 | 1.411542 | 3.194549 | 1.993584 | 1.274938 | 1.806577 |
| PCTUC_53 | 2.388666 | 4.043553 | 1.855829 | 1.771712 | 4.134722 |
| PCTUC_54 | 2.698339 | 2.207234 | 1.160583 | 1.06194 | 2.104804 |
| PCTUC_55 | 1.868779 | 2.478753 | 1.525201 | 1.658344 | 2.55561 |
| PCTUC_56 | 2.17674 | 2.960366 | 1.741503 | 1.720215 | 2.986598 |
| PCTUC_57 | 1.537308 | 2.195412 | 1.311886 | 1.381912 | 1.982858 |
| PCTUC_58 | 1.946348 | 3.042087 | 1.42848 | 1.449061 | 2.855023 |
| PCTUC_59 | 2.022084 | 2.498707 | 1.48394 | 1.429058 | 2.51607 |
| PCTUC_60 | 2.317572 | 2.699497 | 1.835917 | 1.959696 | 3.354239 |
| PCTUC_61 | 2.51545 | 2.741376 | 1.854596 | 1.985688 | 2.947656 |
| PCTUC_62 | 1.618495 | 1.648216 | 1.27043 | 1.286811 | 2.033582 |
| PCTUC_63 | 1.732632 | 2.741961 | 1.420588 | 1.602472 | 3.022122 |
| PCTUC_64 | 1.165401 | 1.982774 | 1.254929 | 1.115399 | 1.751606 |
| PCTUC_65 | 1.336602 | 1.949603 | 1.201375 | 1.276382 | 2.270138 |
| PCTUC_66 | 2.015365 | 2.177838 | 1.630885 | 1.77424 | 2.942512 |
| PCTUC_67 | 2.022251 | 2.405791 | 1.785181 | 1.731284 | 2.81626 |
| PCTUC_68 | 1.317565 | 2.295076 | 1.442385 | 1.217891 | 2.656733 |
| PCTUC_69 | 2.06803 | 2.258815 | 1.488382 | 1.728301 | 2.683501 |
| PCTUC_70 | 2.306625 | 2.912195 | 2.046354 | 1.955802 | 3.254495 |
| PCTUC_71 | 1.905904 | 2.366372 | 1.588232 | 1.677139 | 1.97013 |
| PCTUC_72 | 2.018447 | 3.73358 | 1.421489 | 1.405039 | 2.970055 |
| PCTUC_73 | 1.766525 | 2.412998 | 1.502014 | 1.51544 | 2.075916 |
| PCTUC_74 | 1.691552 | 1.793785 | 1.267592 | 1.185903 | 1.924729 |
| PCTUC_75 | 1.846039 | 3.109019 | 1.663261 | 1.625626 | 2.798696 |
| PCTUC_76 | 1.882731 | 2.066262 | 1.742008 | 2.003987 | 2.153655 |
| PCTUC_77 | 1.369232 | 2.060578 | 1.361874 | 1.062815 | 2.131934 |
| PCTUC_78 | 1.63917 | 2.264273 | 1.436098 | 1.202832 | 2.346673 |
| PCTUC_79 | 2.223718 | 3.031543 | 1.922364 | 1.92482 | 3.363707 |
| PCTUC_80 | 1.467536 | 2.186955 | 1.428232 | 1.371915 | 2.048764 |
| PCTUC_81 | 1.912159 | 2.586055 | 1.59879 | 1.821389 | 2.575871 |
| PCTUC_82 | 1.434465 | 2.289142 | 1.630034 | 1.848266 | 2.4429 |
| PCTUC_83 | 1.891248 | 8.992641 | 1.960748 | 1.456855 | 3.430561 |
| PCTUC_84 | 1.944148 | 2.782467 | 1.558292 | 1.82153 | 7.161571 |
| PCTUC_85 | 1.981983 | 1.957546 | 1.457266 | 1.418137 | 2.307765 |
| PCTUC_86 | 2.379777 | 3.951234 | 2.300241 | 2.094229 | 5.10043 |
| PCTUC_87 | 1.846455 | 2.21849 | 1.671109 | 1.930862 | 2.322542 |
| PCTUC_88 | 2.79995 | 3.726188 | 1.975374 | 2.025747 | 3.535597 |
| PCTUC_89 | 1.382285 | 1.979193 | 1.126635 | 1.163368 | 1.985515 |
| PCTUC_90 | 2.162711 | 2.51384 | 1.80511 | 1.877139 | 2.893159 |
| PCTUC_91 | 1.623899 | 2.305127 | 1.427174 | 1.361678 | 3.340343 |
| PCTUC_92 | 1.828539 | 2.704496 | 1.571857 | 1.476535 | 3.043378 |
| PCTUC_93 | 2.670166 | 6.27784 | 2.639735 | 2.603041 | 5.276127 |
| PCTUC_94 | 1.650576 | 2.347257 | 1.551303 | 1.540996 | 2.319753 |
| PCTUC_95 | 2.15389 | 2.130007 | 1.777067 | 2.088068 | 2.410172 |
| PCTUC_96 | 2.035643 | 2.232943 | 1.849501 | 1.655422 | 3.846957 |
| PCTUC_97 | 2.2532 | 2.703321 | 1.774541 | 1.719427 | 1.937724 |
| PCTUC_98 | 1.823728 | 3.187145 | 1.843798 | 1.578049 | 3.37381 |
| PCTUC_99 | 2.934582 | 3.653785 | 2.223708 | 2.350155 | 3.916004 |
| PCTUC_100 | 2.183041 | 3.85372 | 1.631668 | 1.508529 | 3.716182 |
| PCTUC_101 | 1.998253 | 2.540957 | 1.689489 | 1.447247 | 2.309024 |
| PCTUC_102 | 1.637692 | 2.45107 | 1.566288 | 1.728188 | 2.008309 |
| PCTUC_103 | 2.143254 | 2.904234 | 1.622328 | 1.548801 | 3.37803 |
| PCTUC_104 | 1.696224 | 2.088969 | 1.567019 | 1.532818 | 2.249511 |
| PCTUC_105 | 1.855064 | 2.819359 | 1.567435 | 1.543721 | 2.847837 |
| PCTUC_106 | 2.074095 | 2.583958 | 1.802072 | 2.062965 | 2.517983 |
| PCTUC_107 | 1.436427 | 2.014846 | 1.287173 | 1.42702 | 3.187718 |
| PCTUC_108 | 2.466527 | 2.305113 | 2.542691 | 1.881556 | 2.379215 |
| PCTUC_109 | 2.778593 | 5.835248 | 2.612641 | 2.431126 | 5.114062 |
| PCTUC_110 | 1.765069 | 2.276443 | 1.539449 | 1.588558 | 2.340659 |
| PCTUC_111 | 1.621092 | 2.106955 | 1.258185 | 1.182327 | 2.337887 |
| PCTUC_112 | 1.929109 | 2.886708 | 1.581569 | 1.522645 | 2.817362 |
| PCTUC_113 | 2.183752 | 3.438374 | 1.850835 | 2.011902 | 3.310618 |
| PCTUC_114 | 2.780542 | 6.40439 | 2.686503 | 2.496432 | 4.999533 |
| PCTUC_115 | 2.200367 | 4.069643 | 2.01756 | 2.220671 | 4.177684 |
| PCTUC_116 | 2.287616 | 3.50528 | 2.043065 | 2.038058 | 3.823674 |
| PCTUC_117 | 2.970644 | 6.056041 | 2.398937 | 2.169403 | 2.49033 |
| PCTUC_118 | 2.477434 | 2.172511 | 1.88397 | 1.931524 | 2.371255 |
| PCTUC_119 | 1.776452 | 2.629506 | 1.322001 | 1.291075 | 2.405234 |
| PCTUC_120 | 1.982641 | 4.046946 | 1.732223 | 1.753712 | 4.177029 |
| PCTUC_121 | 2.045416 | 3.467918 | 1.856998 | 1.932082 | 4.08297 |
| PCTUC_122 | 2.082013 | 2.52088 | 1.641259 | 1.772476 | 3.19319 |
| PCTUC_123 | 1.892968 | 2.118932 | 1.447326 | 1.521655 | 2.863929 |
| PCTUC_124 | 2.302006 | 4.194275 | 2.018941 | 2.276732 | 4.738862 |
| PCTUC_125 | 2.642775 | 3.22901 | 2.16624 | 2.453689 | 3.785296 |
| PCTUC_126 | 2.253894 | 3.976677 | 1.994424 | 2.144706 | 4.513967 |
| PCTUC_127 | 2.304186 | 5.744323 | 2.38022 | 2.359522 | 5.583232 |
| PCTUC_128 | 2.553788 | 4.196769 | 2.379538 | 2.46891 | 4.286704 |
| PCTUC_129 | 2.325642 | 2.745098 | 1.756556 | 1.931827 | 3.167695 |
| PCTUC_130 | 1.703418 | 2.36412 | 1.743213 | 1.60323 | 2.148247 |
| PCTUC_131 | 1.724546 | 2.582779 | 1.392246 | 1.469603 | 2.513543 |
| PCTUC_132 | 1.940151 | 2.216878 | 1.970094 | 1.976734 | 2.568789 |
| RCTUC_133 | 2.553717 | 3.466767 | 1.779728 | 1.567245 | 4.051633 |
| PCTUC_134 | 2.376674 | 4.774848 | 2.152457 | 1.8395 | 4.683371 |
| PCTUC_135 | 2.144651 | 2.649289 | 1.787653 | 1.872877 | 3.417997 |
| PCTUC_136 | 2.148641 | 2.10056 | 1.450171 | 1.367047 | 2.250633 |
| PCTUC_137 | 2.130816 | 3.194793 | 1.684232 | 1.613193 | 2.966923 |
| PCTUC_138 | 2.136258 | 3.341462 | 1.642945 | 1.58273 | 3.252918 |
| PCTUC_139 | 1.473054 | 1.985499 | 1.192933 | 1.173492 | 2.241265 |
| PCTUC_140 | 2.382936 | 5.190052 | 2.593684 | 2.288506 | 5.946975 |
| PCTUC_141 | 2.122445 | 3.281591 | 1.948166 | 2.022838 | 3.489888 |
| PCTUC_142 | 2.632055 | 6.609196 | 2.636786 | 2.29089 | 5.705941 |
| PCTUC_143 | 2.046356 | 2.483107 | 1.691251 | 1.867148 | 2.636136 |
| PCTUC_144 | 1.992145 | 2.628616 | 1.684575 | 1.899628 | 2.873412 |
| PCTUC_145 | 2.29488 | 2.37603 | 1.896473 | 1.935271 | 2.790786 |
| PCTUC_146 | 2.349353 | 2.360452 | 1.53855 | 1.534619 | 2.342172 |
| PCTUC_147 | 1.97557 | 1.49492 | 1.63718 | 2.030017 | −1.038416 |
| PCTUC_148 | 2.326489 | 3.609815 | 1.936063 | 1.768154 | 3.691488 |
| PCTUC_149 | 2.223878 | 2.409088 | 1.720194 | 1.945538 | 3.391234 |
| PCTUC_150 | 2.333193 | 4.274464 | 2.124192 | 1.964887 | 4.341965 |
| PCTUC_151 | 2.408074 | 1.836668 | 1.819378 | 1.927453 | 1.641701 |
| PCTUC_152 | 2.381697 | 2.747643 | 1.664237 | 1.933687 | 2.809088 |
| PCTUC_153 | 1.62262 | 2.523015 | 3.05855 | 1.294968 | 2.128255 |
| PCTUC_154 | 1.969294 | 4.241415 | 1.971435 | 1.899327 | 3.933199 |
| PCTUC_155 | 1.909149 | 3.250235 | 1.912516 | 1.746694 | 3.157428 |
| PCTUC_156 | 1.451361 | 2.080686 | 1.431723 | 1.311998 | 2.154091 |
| PCTUC_157 | 2.139517 | 2.237462 | 1.468132 | 1.596464 | 2.680392 |
| PCTUC_158 | 2.340751 | 2.427624 | 1.720458 | 1.846447 | 2.538067 |
| PCTUC_159 | 2.592723 | 2.82934 | 1.762373 | 1.801574 | 3.712104 |
| PCTUC_160 | 1.827864 | 2.666218 | 1.512777 | 1.535254 | 3.099494 |
| PCTUC_161 | 1.970345 | 2.297757 | 1.646088 | 1.982166 | 2.605821 |
| PCTUC_162 | 1.439782 | 2.222644 | 1.286601 | 1.290794 | 2.162714 |
| PCTUC_163 | 2.345697 | 3.837572 | 1.862247 | 1.813233 | 3.450867 |
| PCTUC_164 | 2.004076 | 3.285513 | 1.74896 | 1.715412 | 3.191004 |
| PCTUC_165 | 2.412875 | 3.80279 | 2.015456 | 1.967204 | 4.143846 |
| PCTUC_166 | 2.181621 | 2.471198 | 1.548179 | 1.592577 | 2.671936 |
| PCTUC_167 | 2.096034 | 3.911778 | 2.010473 | 1.741283 | 3.903537 |
| PCTUC_168 | 1.651318 | 2.208828 | 1.587337 | 1.49218 | 2.213346 |
| PCTUC_169 | 1.811134 | 2.690632 | 1.77663 | 1.493697 | 3.244027 |
| PCTUC_170 | 2.528349 | 4.629561 | 2.096909 | 1.838336 | 3.974016 |
| PCTUC_171 | 3.086575 | 5.856294 | 3.12292 | 2.78069 | 5.925259 |
| PCTUC_172 | 2.610924 | 3.449815 | 1.901268 | 1.79184 | 3.248729 |
| PCTUC_173 | 3.236281 | 5.599024 | 2.767506 | 3.135199 | 5.606467 |
| PCTUC_174 | 1.971308 | 3.937824 | 1.747312 | 1.87709 | 3.60039 |
| PCTUC_175 | 2.017454 | 2.898789 | 1.806199 | 1.675621 | 3.033045 |
| PCTUC_176 | 3.282002 | 5.875219 | 2.919173 | 2.342964 | 5.071948 |
| PCTUC_177 | 2.392638 | 2.791999 | 1.879821 | 1.711466 | 2.876557 |
| PCTUC_178 | 2.094212 | 3.932021 | 1.863073 | 1.688921 | 3.519515 |
| PCTUC_179 | 2.173889 | 2.059803 | 1.524988 | 1.567178 | 2.219269 |
| PCTUC_180 | 2.07498 | 4.72869 | 2.369165 | 1.775542 | 3.810833 |
| PCTUC_181 | 2.282053 | 2.447175 | 1.364804 | 1.565102 | 2.661733 |
| PCTUC_182 | 2.141199 | 2.648744 | 1.563208 | 1.846968 | 2.751587 |
| PCTUC_183 | 3.488463 | 3.83314 | 2.357281 | 2.562478 | 3.983159 |
| PCTUC_184 | 2.221076 | 4.22895 | 1.935559 | 1.942214 | 4.078297 |
| PCTUC_185 | 2.449592 | 3.155836 | 1.881579 | 2.034842 | 2.937128 |
| PCTUC_186 | 1.762882 | 2.359142 | 1.321211 | 1.423152 | 2.671936 |
| PCTUC_187 | 1.822807 | 2.58226 | 1.442614 | 1.449022 | 1.951994 |
| PCTUC_188 | 1.923808 | 2.515208 | 2.389021 | 1.911519 | 2.53708 |
| PCTUC_189 | 1.948982 | 2.841221 | 1.626155 | 1.526462 | 3.049721 |
| PCTUC_190 | 1.959037 | 3.718122 | 1.823316 | 3.125287 | 2.35109 |
| PCTUC_191 | 1.410424 | 1.569667 | 1.231558 | 1.251293 | 2.681443 |
| PCTUC_192 | 2.053974 | 2.829744 | 1.849315 | 1.897637 | 2.560419 |
| PCTUC_193 | 2.839539 | 2.441042 | 1.599217 | 1.521155 | 2.689553 |
| PCTUC_194 | 2.15666 | 1.996907 | 1.367373 | 1.717722 | 2.412942 |
| PCTUC_195 | 2.665177 | 2.113436 | 1.762802 | 1.931272 | 2.876521 |
| PCTUC_196 | 2.20503 | 2.648168 | 1.708679 | 1.791299 | 2.873039 |
| PCTUC_197 | 3.055709 | 3.674174 | 2.145274 | 2.452721 | 3.976326 |
| PCTUC_198 | 1.477454 | 1.937081 | 1.136061 | 1.210487 | 1.95604 |
| PCTUC_199 | 1.971808 | 2.898166 | 1.580341 | 1.694481 | 3.270516 |
| PCTUC_200 | 2.122297 | 3.621145 | 1.752643 | 1.561154 | 3.118557 |
| PCTUC_201 | 2.389857 | 3.803328 | 1.984605 | 2.117899 | 4.475106 |
| PCTUC_202 | 2.36793 | 2.626245 | 1.949721 | 2.03951 | 3.720536 |
| PCTUC_203 | 2.429015 | 3.120531 | 1.843767 | 1.782332 | 3.47691 |
| PCTUC_204 | 1.724228 | 3.185202 | 1.524506 | 1.612622 | 3.460114 |
| PCTUC_205 | 2.399812 | 5.050709 | 1.950805 | 2.01819 | 3.854446 |
| PCTUC_206 | 2.016684 | 2.115916 | 1.595259 | 1.762565 | 2.502826 |
| PCTUC_207 | 2.449808 | 3.13117 | 1.808911 | 2.02143 | 3.636165 |
| PCTUC_208 | 1.780541 | 2.820107 | 1.579203 | 1.625143 | 2.405794 |
| PCTUC_209 | 2.801661 | 3.453332 | 2.032379 | 1.982221 | 3.402283 |
| PCTUC_210 | 2.062106 | 2.313428 | 1.465423 | 1.57732 | 2.748908 |
| PCTUC_211 | 3.358549 | 1.721248 | 1.794588 | 3.601527 | 1.869076 |
| PCTUC_212 | 2.351744 | 2.68273 | 1.898117 | 2.273726 | 3.325987 |
| PCTUC_213 | 2.730678 | 3.296502 | 1.68906 | 1.697095 | 2.686597 |
| PCTUC_214 | 2.54486 | 2.329126 | 1.914379 | 2.146495 | 2.587393 |
| PCTUC_215 | 2.029841 | 2.073445 | 1.530253 | 1.860207 | 2.410172 |
| PCTUC_216 | 1.986904 | 3.159026 | 1.655331 | 1.574419 | 2.840889 |
| PCTUC_217 | 1.633083 | 2.003624 | 1.448483 | 1.324029 | 1.629999 |
| PCTUC_218 | 2.244204 | 2.915729 | 2.017862 | 1.920212 | 3.04816 |
| PCTUC_219 | 2.246086 | 2.49719 | 1.829735 | 1.570088 | 2.706755 |
| PCTUC_220 | 3.079557 | 4.331718 | 2.211666 | 2.502485 | 4.280556 |
| PCTUC_221 | 2.239766 | 2.779905 | 1.819913 | 1.950109 | 3.386697 |
| PCTUC_222 | 1.600726 | 3.542366 | 3.206866 | 2.886933 | 1.440514 |
| PCTUC_223 | 2.104468 | 2.600874 | 2.20841 | 1.920786 | 2.423107 |
| PCTUC_224 | 2.151362 | 1.813645 | 3.464472 | 5.390255 | 2.281284 |
| PCTUC_225 | 3.906109 | 5.627452 | 2.692037 | 3.592667 | 19.34424 |
| PCTUC_226 | 3.494833 | 5.578166 | 2.032682 | 1.216262 | 2.716067 |
| PCTUC_227 | 2.810362 | 2.059662 | 1.627353 | 1.244153 | 1.214697 |
| PCTUC_228 | 2.201654 | 2.169393 | 1.981317 | 1.985123 | 2.967201 |
| PCTUC_229 | 11.366358 | 2.173938 | 1.090219 | 1.220566 | −1.039668 |
| PCTUC_230 | 3.375315 | 4.060716 | 2.39143 | 1.668518 | 2.078012 |
| PCTUC_231 | 3.248742 | 3.047224 | 2.090379 | 1.713994 | 1.59874 |
| PCTUC_232 | 1.755365 | 2.104231 | 1.455328 | 1.451029 | 1.513414 |
| PCTUC_233 | 2.583899 | 5.946256 | 1.862887 | 1.460509 | 1.088642 |
| PCTUC_234 | 2.467569 | 1.992606 | 1.732377 | 1.383298 | 1.762978 |
| PCTUC_235 | 2.405652 | 2.480653 | 1.955835 | 1.977734 | 1.048993 |
| PCTUC_236 | 2.641375 | 1.227863 | 2.045434 | 1.940119 | −1.244945 |
| PCTUC_237 | 2.522561 | 2.560848 | 1.990514 | 1.659553 | 1.692141 |
| PCTUC_238 | 2.315423 | 1.905347 | 1.35975 | 1.348598 | 1.412436 |
| PCTUC_239 | 2.102382 | 2.242059 | 1.890734 | 1.040776 | 1.178056 |
| PCTUC_240 | 2.408981 | 2.352341 | 1.59466 | 1.537688 | 1.248939 |
| PCTUC_241 | 1.941355 | 2.154684 | 1.518697 | 1.660347 | 1.22467 |
| PCTUC_242 | 2.47675 | 2.847825 | 1.734511 | 1.592506 | 1.85966 |
| PCTUC_243 | 2.971365 | 2.163603 | 1.472201 | 1.335836 | 1.134337 |
| PCTUC_244 | 4.580625 | 1.684575 | 1.141275 | 1.186582 | 1.499127 |
| PCTUC_245 | 2.870873 | 1.709187 | 1.645507 | 1.94663 | 1.993426 |
| PCTUC_246 | 2.515966 | 1.997775 | 1.543553 | 1.387189 | 2.290185 |
| PCTUC_247 | 7.588651 | 3.970692 | 1.914703 | 1.88352 | 1.212324 |
| PCTUC_248 | 4.41854 | 3.05227 | 1.999376 | 1.683012 | −1.188447 |
| PCTUC_249 | 2.56015 | 2.500697 | 1.469604 | 1.28346 | 1.287332 |
| PCTUC_250 | 2.685042 | 3.859677 | 1.120608 | 1.711187 | 1.100062 |
| PCTUC_251 | 1.91974 | 2.922307 | 1.973029 | 1.510662 | 2.356412 |
| PCTUC_252 | 3.177958 | 1.795341 | 3.212665 | 2.383147 | 1.357193 |
| PCTUC_253 | 3.474582 | 3.422618 | 2.248334 | 2.004326 | 2.14971 |
| PCTUC_254 | 2.120358 | 2.259684 | 1.491716 | 1.528243 | 1.586254 |
| PCTUC_255 | 2.572479 | 2.529292 | 1.830403 | 1.752406 | 1.939718 |
| PCTUC_256 | 3.878601 | 3.361156 | 2.1136 | 1.729907 | 1.614187 |
| PCTUC_257 | 2.163267 | 2.263555 | 1.808706 | 1.676525 | 1.800374 |
| PCTUC_258 | 2.388353 | 2.488551 | 1.975504 | 1.860139 | 1.840538 |
| PCTUC_259 | 3.016547 | 3.151346 | 1.743907 | 2.172231 | 1.840373 |
| PCTUC_260 | 3.98491 | 5.031919 | 2.992211 | 2.621613 | 2.29796 |
| PCTUC_261 | 2.601377 | 1.858821 | 2.109545 | 2.090508 | 1.311203 |
| PCTUC_262 | 3.619794 | 2.708431 | 2.073283 | 2.071872 | 1.774984 |
| PCTUC_263 | 3.303594 | 2.90581 | 2.419173 | 1.984032 | 2.126918 |
| PCTUC_264 | 2.046339 | 2.045633 | 1.52259 | 1.660213 | 1.513248 |
| PCTUC_265 | 2.243312 | 2.335322 | 1.585328 | 1.816227 | 1.789087 |
| PCTUC_266 | 5.015629 | 5.737246 | 2.474179 | 2.203052 | 2.508281 |
| PCTUC_267 | 3.728191 | 3.790784 | 2.335161 | 2.334736 | 2.23775 |
| PCTUC_268 | 3.314795 | 2.694717 | 1.956361 | 1.864354 | 1.89976 |
| PCTUC_269 | 2.84269 | 3.09059 | 2.076964 | 2.083827 | 1.921276 |
| PCTUC_270 | 2.809991 | 3.040862 | 2.439587 | 1.90887 | 2.154098 |
| PCTUC_271 | 2.030727 | 2.214447 | 1.438683 | 1.827851 | 1.479516 |
| PCTUC_272 | 2.689879 | 1.867979 | 2.398205 | 1.676425 | 2.069532 |
| PCTUC_273 | 3.520804 | 2.604538 | 1.902172 | 1.925295 | 1.677577 |
| PCTUC_274 | 2.37426 | 2.281653 | 2.032656 | 2.082908 | 2.151423 |
| PCTUC_275 | 2.22381 | 2.450564 | 1.834214 | 1.665578 | 1.4253 |
| PCTUC_276 | 4.804692 | 7.184418 | 2.741525 | 2.269183 | 1.86227 |
| PCTUC_277 | 2.347694 | 2.035078 | 1.350143 | 1.733654 | 1.361137 |
| PCTUC_278 | 2.294004 | 2.944572 | 2.302722 | 1.926946 | 1.729742 |
| PCTUC_279 | 3.504003 | 3.252621 | 1.94464 | 1.827564 | 1.639722 |
| PCTUC_280 | 2.37598 | 2.145716 | 1.585682 | 1.801991 | 1.743704 |
| PCTUC_281 | 3.037311 | 3.299949 | 2.038734 | 2.113893 | 1.853485 |
| PCTUC_282 | 2.668364 | 2.674275 | 1.758186 | 2.16771 | 1.703983 |
| PCTUC_283 | 2.137884 | 2.072191 | 1.510265 | 2.0916 | 1.643327 |
| PCTUC_284 | 2.53009 | 2.233893 | 1.631901 | 1.9737 | 1.555607 |
| PCTUC_285 | 6.332763 | 6.443246 | 2.791887 | 2.457937 | 2.505342 |
| PCTUC_286 | 5.257563 | 5.886498 | 2.668014 | 2.212737 | 2.399585 |
| PCTUC_287 | 3.52928 | 3.100616 | 1.847619 | 1.494685 | 1.53431 |
| PCTUC_288 | 2.102673 | 2.525493 | 1.98892 | 2.130579 | 1.632277 |
| PCTUC_289 | 3.147058 | 3.372461 | 2.276921 | 2.246916 | 2.168657 |
| PCTUC_290 | 4.222344 | 3.670878 | 2.668959 | 2.422289 | 2.324938 |
| PCTUC_291 | 2.935719 | 2.719058 | 1.784167 | 1.982964 | 1.827909 |
| PCTUC_292 | 2.984468 | 2.835538 | 1.844973 | 1.998731 | 1.794246 |
| PCTUC_293 | 2.489122 | 2.058945 | 1.877674 | 2.014703 | 1.595915 |
| PCTUC_294 | 3.294222 | 3.462772 | 2.499072 | 2.195277 | 2.22694 |
| PCTUC_295 | 3.380114 | 2.602693 | 2.26526 | 1.921976 | 1.776908 |
| PCTUC_296 | 2.686099 | 2.244886 | 1.919786 | 1.873626 | 1.961759 |
| PCTUC_297 | 5.196949 | 5.286231 | 3.698334 | 2.791397 | 2.839808 |
| PCTUC_298 | 5.587264 | 2.298222 | 1.91904 | 2.037368 | 1.683946 |
| PCTUC_299 | 5.689084 | 4.919997 | 2.865614 | 2.004579 | 2.254943 |
| PCTUC_300 | 6.772169 | 3.684442 | 2.120501 | 2.219169 | 1.733218 |
| PCTUC_301 | 2.093773 | 2.044039 | 1.909037 | 1.69156 | 2.246853 |
| PCTUC_302 | 3.991078 | 4.580527 | 3.303583 | 2.55929 | 2.767085 |
| PCTUC_303 | 2.370317 | 2.022451 | 1.91632 | 2.531979 | 2.379047 |
| PCTUC_304 | 4.127187 | 3.126195 | 2.034232 | 2.095927 | 1.715794 |
| PCTUC_305 | 2.935688 | 1.487187 | 2.214246 | 2.058172 | 1.721464 |
| PCTUC_306 | 4.746076 | 3.343698 | 2.685661 | 2.155374 | 2.034321 |
| PCTUC_307 | 3.019703 | 2.24161 | 1.876862 | 2.00637 | 1.467769 |
| PCTUC_308 | 4.673458 | 5.029093 | 2.33969 | 2.097128 | 1.778258 |
| PCTUC_309 | 3.407573 | 3.376861 | 2.267434 | 2.172949 | 1.753296 |
| PCTUC_310 | 2.189645 | 2.488225 | 4.420121 | 2.173265 | 1.631521 |
| PCTUC_311 | 2.658834 | 2.382129 | 4.32649 | 1.990568 | 1.769064 |
| PCTUC_312 | 2.127386 | 1.679055 | 2.66417 | 2.236 | 1.107264 |
| PCTUC_313 | 2.975827 | 3.533522 | 2.131942 | 2.058614 | 1.96968 |
| PCTUC_314 | 2.64863 | 3.640082 | 1.860648 | 2.294988 | 1.724837 |
| PCTUC_315 | 2.214283 | 2.206159 | 1.810798 | 1.912709 | 1.248759 |
| PCTUC_316 | 5.557586 | 6.430025 | 2.668887 | 2.1117 | 2.184844 |
| PCTUC_317 | 3.648384 | 3.385846 | 2.241048 | 2.291818 | 1.939281 |
| PCTUC_318 | 5.378511 | 6.426007 | 2.462233 | 2.000173 | 2.068377 |
| PCTUC_319 | 5.452092 | 7.002919 | 3.448654 | 2.65954 | 2.582983 |
| PCTUC_320 | 3.295201 | 3.224249 | 2.418855 | 2.438641 | 2.368528 |
| PCTUC_321 | 2.895834 | 2.315506 | 1.904166 | 2.068255 | 1.961573 |
| PCTUC_322 | 4.143029 | 5.302269 | 2.638332 | 2.136894 | 2.147911 |
| PCTUC_323 | 2.067646 | 2.595632 | 1.525776 | 1.976109 | 1.566396 |
| PCTUC_324 | 2.691354 | 2.89679 | 2.010389 | 2.294306 | 2.107959 |
| PCTUC_325 | 3.999175 | 3.23015 | 2.139746 | 2.538517 | 1.643733 |
| PCTUC_326 | 2.297636 | 1.943776 | 1.721583 | 2.195745 | 1.830882 |
| PCTUC_327 | 4.567304 | 4.428077 | 2.616247 | 2.32428 | 2.129087 |
| PCTUC_328 | 3.539221 | 4.166342 | 2.380124 | 2.448791 | 2.493793 |
| PCTUC_329 | 1.970259 | 1.817101 | 1.692714 | 1.927202 | 1.728867 |
| PCTUC_330 | 2.135586 | 2.0755 | 1.759994 | 2.094738 | 1.947718 |
| PCTUC_331 | 2.782232 | 2.653003 | 1.978628 | 2.037058 | 2.079432 |
| PCTUC_332 | 3.111092 | 2.687885 | 1.992779 | 1.905652 | 1.79761 |
| PCTUC_333 | 2.318447 | 1.787268 | 1.849104 | 1.798626 | 1.446862 |
| PCTUC_334 | 1.874384 | 1.992494 | 1.40384 | 1.65309 | 1.245036 |
| PCTUC_335 | 2.611389 | 2.576149 | 1.959713 | 1.970436 | 1.718427 |
| PCTUC_336 | 2.330261 | 2.28512 | 1.535005 | 8.98456 | 1.550727 |
| PCTUC_337 | 2.241662 | 2.23638 | 1.488679 | 1.767888 | 1.63189 |
| PCTUC_338 | 2.815969 | 2.403253 | 1.838307 | 2.069623 | 1.498996 |
| PCTUC_339 | 2.58594 | 2.473097 | 1.910527 | 2.242478 | 1.915542 |
| PCTUC_340 | 5.321351 | 3.654036 | 2.543868 | 2.509842 | 1.970748 |
| PCTUC_341 | 2.227542 | 2.025373 | 1.566321 | 1.932986 | 1.604847 |
| PCTUC_342 | 2.521508 | 1.735598 | 1.899227 | 1.924772 | 1.730055 |
| PCTUC_343 | 3.248326 | 2.382129 | 1.834694 | 1.930941 | 1.510622 |
| PCTUC_344 | 3.774367 | 3.566884 | 2.270241 | 2.083904 | 2.056787 |
| PCTUC_345 | 2.884718 | 2.611996 | 1.692929 | 2.084061 | 1.635321 |
| PCTUC_346 | 3.646603 | 3.245387 | 2.435109 | 2.143002 | 1.781983 |
| PCTUC_347 | 4.438542 | 4.959843 | 2.631065 | 2.431357 | 2.271578 |
| PCTUC_348 | 2.75379 | 2.535014 | 1.90771 | 2.465073 | 1.67656 |
| PCTUC_349 | 3.909889 | 4.528754 | 2.668959 | 2.322136 | 2.002069 |
| PCTUC_350 | 2.792134 | 2.57382 | 1.883458 | 2.029199 | 1.951232 |
| PCTUC_351 | 4.496643 | 2.292628 | 1.605078 | 1.953279 | 1.640106 |
| PCTUC_352 | 2.975827 | 3.498726 | 1.761696 | 1.601816 | 1.62745 |
| PCTUC_353 | 5.921041 | 1.897311 | 1.294325 | 1.676672 | 1.453307 |
| PCTUC_354 | 6.059254 | 6.249482 | 3.449207 | 2.921316 | 2.949268 |
| PCTUC_355 | 6.229225 | 5.959078 | 3.044651 | 2.209111 | 2.548369 |
| PCTUC_356 | 3.354931 | 3.866993 | 2.345238 | 2.18334 | 1.88739 |
| PCTUC_357 | 2.751259 | 2.617638 | 2.173257 | 2.049143 | 2.249806 |
| PCTUC_358 | 1.569435 | 1.690702 | 1.300281 | 1.784292 | 1.63359 |
| PCTUC_359 | 2.559835 | 2.73093 | 1.689176 | 1.995529 | 1.681855 |
| PCTUC_360 | 4.107032 | 3.399894 | 2.794858 | 2.497178 | 2.294676 |
| PCTUC_361 | 3.003746 | 2.494177 | 1.995029 | 1.932543 | 1.674815 |
| PCTUC_362 | 2.440848 | 2.140181 | 1.675391 | 1.78602 | 1.55943 |
| PCTUC_363 | 2.743691 | 3.369475 | 2.163374 | 2.025629 | 1.782426 |
| PCTUC_364 | 5.331734 | 6.668924 | 2.512076 | 2.79165 | 2.216435 |
| PCTUC_365 | 2.84881 | 2.181204 | 1.583908 | 1.936329 | 1.921305 |
| PCTUC_366 | 3.93763 | 3.833567 | 2.871508 | 2.51805 | 2.47756 |
| PCTUC_367 | 4.134794 | 3.168116 | 2.510271 | 2.138366 | 1.921304 |
| PCTUC_368 | 3.757106 | 3.676876 | 2.459811 | 2.157374 | 2.073027 |
| PCTUC_369 | 3.708133 | 2.510159 | 2.104059 | 1.597603 | 1.478547 |
| PCTUC_370 | 3.867609 | 3.547782 | 2.471164 | 2.112282 | 2.015814 |
| PCTUC_371 | 2.545983 | 1.902669 | 1.798742 | 2.149657 | 1.362599 |
| PCTUC_372 | 2.120895 | 1.985513 | 1.655881 | 1.857098 | 1.574041 |
| PCTUC_373 | 3.317969 | 3.300145 | 2.590271 | 2.307053 | 2.30217 |
| PCTUC_374 | 1.610954 | 1.528575 | 1.254938 | 1.805304 | 1.661116 |
| PCTUC_375 | 2.64639 | 2.026726 | 2.394302 | 1.965622 | 1.688982 |
| PCTUC_376 | 2.58554 | 2.26397 | 2.149105 | 1.910245 | 1.473766 |
| PCTUC_377 | 1.974547 | 1.843346 | 1.498608 | 1.76156 | 1.304683 |
| PCTUC_378 | 1.799032 | 1.909818 | 1.266351 | 1.805849 | 1.422752 |
| PCTUC_379 | 2.809991 | 3.104309 | 1.618504 | 1.965153 | 1.507427 |
| PCTUC_380 | 2.062649 | 1.906358 | 1.564003 | 2.094136 | 1.68139 |
| PCTUC_381 | 4.934052 | 7.285052 | 2.611982 | 2.38664 | 2.165479 |
| PCTUC_382 | 3.145328 | 3.340626 | 2.167187 | 2.4187 | 1.973113 |
| PCTUC_383 | 3.160824 | 3.060342 | 2.072027 | 2.30552 | 2.01981 |
| PCTUC_384 | 3.120152 | 2.910294 | 1.922039 | 1.802327 | 1.571349 |
| PCTUC_385 | 3.083806 | 3.15393 | 2.544231 | 2.492088 | 2.528433 |
| PCTUC_386 | 3.162037 | 3.094964 | 2.126098 | 2.45989 | 2.204981 |
| PCTUC_387 | 4.007894 | 3.551215 | 3.060653 | 2.760879 | 2.148093 |
| PCTUC_388 | 1.665821 | 1.71606 | 1.326498 | 1.722747 | 1.737454 |
| PCTUC_389 | 1.640459 | 6.711383 | 1.958431 | 2.48378 | 1.404279 |
| PCTUC_390 | 1.75192 | 1.944185 | 1.57942 | 2.008176 | 1.780645 |
| PCTUC_391 | 4.6229 | 4.782019 | 3.078028 | 2.821985 | 2.757624 |
| PCTUC_392 | 3.485953 | 2.236763 | 1.643519 | 2.5109 | 1.94171 |
| PCTUC_393 | 3.429088 | 3.19615 | 2.760777 | 2.330962 | 2.317443 |
| PCTUC_394 | 1.956778 | 2.014125 | 2.407287 | 2.088266 | 1.803808 |
| PCTUC_395 | 2.301491 | 1.941803 | 2.02459 | 2.445048 | 1.522407 |
| PCTUC_396 | 2.572758 | 2.096845 | 1.77806 | 1.988507 | 1.516392 |
| PCTUC_397 | 3.461717 | 3.924062 | 2.397048 | 2.627406 | 2.340878 |
| PCTUC_398 | 2.060445 | 2.129671 | 1.765777 | 2.154751 | 2.0387 |
| PCTUC_399 | 1.784871 | 1.92874 | 1.606977 | 2.111418 | 1.982721 |
| PCTUC_400 | 2.912105 | 2.509347 | 2.208568 | 2.187831 | 1.902238 |
| PCTUC_402 | 2.473379 | 2.035924 | 2.015918 | 2.125032 | 1.846033 |
| PCTUC_403 | 3.044617 | 2.684285 | 2.137905 | 2.04104 | 1.860546 |
| PCTUC_404 | 2.718181 | 2.694169 | 2.300801 | 2.303463 | 2.093521 |
| PCTUC_406 | 3.178427 | 2.74695 | 2.29744 | 2.217696 | 2.166758 |
| PCTUC_407 | 3.056299 | 2.663542 | 2.343237 | 2.35323 | 2.213864 |
| PCTUC_408 | 2.020171 | 2.288822 | 1.580787 | 2.087243 | 2.022461 |
| PCTUC_409 | 2.004701 | 1.91753 | 2.043845 | 2.029877 | 1.374792 |
| PCTUC_410 | 2.823477 | 2.079084 | 1.828117 | 1.971688 | 2.59637 |
| PCTUC_411 | 2.442635 | 2.821673 | 2.1775 | 2.162623 | 2.374948 |
| PCTUC_412 | 2.522494 | 2.787869 | 2.044906 | 2.251569 | 1.78448 |
| PCTUC_413 | 4.823759 | 4.816738 | 2.444866 | 2.557981 | 2.332555 |
| PCTUC_414 | 4.140165 | 4.372881 | 2.41847 | 2.4379 | 2.252348 |
| PCTUC_415 | 2.581056 | 2.333065 | 1.748048 | 2.177715 | 1.781241 |
| PCTUC_416 | 3.979205 | 4.425482 | 3.179835 | 2.49232 | 2.257952 |
| PCTUC_417 | 3.114341 | 3.119072 | 2.283371 | 2.453368 | 2.115911 |
| PCTUC_418 | 3.380672 | 2.566587 | 2.098064 | 1.985276 | 1.816855 |
| PCTUC_419 | 2.318419 | 2.760706 | 2.229328 | 2.329481 | 1.766098 |
| PCTUC_420 | 2.963531 | 3.143115 | 2.18586 | 2.355827 | 2.258371 |
| PCTUC_421 | 3.523689 | 2.163615 | 1.651499 | 2.514414 | 1.430685 |
| PCTUC_422 | 2.236862 | 2.181313 | 2.204773 | 1.380721 | 1.466239 |
| PCTUC_423 | 3.100164 | 2.768556 | 2.230654 | 2.389357 | 2.029327 |
| PCTUC_424 | 4.047059 | 3.834085 | 2.527061 | 2.484142 | 2.170724 |
| PCTUC_425 | 1.785719 | 1.839733 | 1.472349 | 2.018828 | 1.833956 |
| PCTUC_426 | 6.098773 | 5.734037 | 3.16041 | 2.664088 | 2.467161 |
| PCTUC_427 | 2.271291 | 2.464738 | 1.668215 | 1.816736 | 1.593545 |
| PCTUC_428 | 5.065524 | 5.161148 | 3.054286 | 2.644954 | 2.300476 |
| PCTUC_429 | 4.544531 | 5.866208 | 2.376281 | 2.569743 | 2.496617 |
| PCTUC_430 | 6.353233 | 5.8785 | 2.560364 | 2.614165 | 2.184317 |
| PCTUC_431 | 3.771823 | 4.187628 | 2.359161 | 2.35775 | 2.100648 |
| PCTUC_432 | 3.056736 | 2.814484 | 2.227544 | 2.181698 | 2.094198 |
| PCTUC_433 | 4.054384 | 4.009579 | 2.622651 | 2.591521 | 2.812049 |
| PCTUC_434 | 2.326007 | 2.291512 | 2.000558 | 2.329474 | 2.327149 |
| PCTUC_435 | 3.45679 | 3.138741 | 2.380019 | 2.03344 | 1.681855 |
| PCTUC_436 | 2.63824 | 2.092904 | 1.829563 | 1.843457 | 1.680504 |
| PCTUC_437 | 6.731214 | 8.586503 | 3.54067 | 2.651634 | 3.064444 |
| PCTUC_438 | 4.981229 | 5.375686 | 2.421715 | 2.319799 | 2.014582 |
| PCTUC_439 | 2.697179 | 2.422815 | 2.011376 | 1.926572 | 2.499886 |
| PCTUC_440 | 2.149141 | 2.022499 | 1.430869 | 2.1492 | 1.660266 |
| PCTUC_441 | 4.051781 | 3.311647 | 2.314 | 2.437911 | 2.113835 |
| PCTUC_442 | 3.187954 | 2.164001 | 2.019149 | 2.336673 | 1.726152 |
| PCTUC_443 | 2.877242 | 2.275949 | 2.151833 | 1.90094 | 1.556428 |
| PCTUC_444 | 2.654798 | 2.379096 | 1.644744 | 2.113579 | 1.462735 |
| PCTUC_445 | 2.696902 | 2.734087 | 2.162968 | 2.128721 | 1.531066 |
| PCTUC_446 | 3.552812 | 3.808604 | 2.448 | 2.377787 | 2.223854 |
| PCTUC_447 | 2.457076 | 2.397561 | 1.660214 | 1.962635 | 1.665535 |
| PCTUC_448 | 2.260049 | 1.830025 | 2.049749 | 2.111274 | 1.336249 |
| PCTUC_449 | 5.494178 | 6.597764 | 2.759527 | 2.631596 | 2.232384 |
| PCTUC_450 | 5.396477 | 5.850169 | 2.957937 | 2.551245 | 2.323228 |
| PCTUC_451 | 3.234099 | 3.824688 | 1.805116 | 1.960044 | 1.567665 |
| PCTUC_452 | 1.988279 | 1.911949 | 1.746898 | 1.9211 | 1.410218 |
| PCTUC_453 | 4.156703 | 3.429154 | 2.668119 | 2.437835 | 1.985651 |
| PCTUC_454 | 1.863835 | 1.840781 | 1.565095 | 2.077737 | 1.72461 |
| PCTUC_455 | 3.180538 | 3.255673 | 2.373674 | 2.493548 | 2.303203 |
| PCTUC_456 | 2.603995 | 2.660861 | 1.828479 | 2.013692 | 2.134072 |
| PCTUC_457 | 1.951543 | 1.738451 | 1.314122 | 1.450489 | 1.474622 |
| PCTUC_458 | 3.082505 | 3.1755 | 1.641161 | 1.860139 | 2.340101 |
| PCTUC_459 | 2.093832 | 2.06715 | 1.780446 | 1.808486 | 1.52498 |
| PCTUC_460 | 4.152094 | 3.292449 | 2.278043 | 2.468725 | 2.022536 |
| PCTUC_461 | 2.949867 | 3.067491 | 2.152803 | 1.982133 | 1.933115 |
| PCTUC_462 | 5.260846 | 3.310389 | 3.009029 | 2.364296 | 2.113845 |
| PCTUC_464 | 3.028954 | 3.059962 | 2.519372 | 1.971144 | 1.852329 |
| PCTUC_467 | 1.851681 | 1.727232 | 1.185358 | 1.913809 | 1.664958 |
| PCTUC_468 | 5.289123 | 4.978931 | 2.630347 | 3.07653 | 2.621873 |
| PCTUC_469 | 3.783153 | 4.114516 | 2.305927 | 2.928126 | 2.397941 |
| PCTUC_470 | 7.936601 | 6.850856 | 3.652995 | 2.918136 | 2.82882 |
| PCTUC_471 | 2.180746 | 2.761191 | 2.199378 | 2.584434 | 2.013092 |
| PCTUC_472 | 5.085942 | 5.354563 | 3.110618 | 2.8712 | 2.575828 |
| PCTUC_473 | 4.312363 | 3.72427 | 2.239403 | 2.415173 | 1.983299 |
| PCTUC_474 | 3.696658 | 3.291336 | 2.905436 | 2.244899 | 2.026702 |
| PCTUC_475 | 5.070798 | 5.750005 | 3.2816 | 2.710166 | 2.482052 |
| PCTUC_476 | 4.073975 | 4.069614 | 2.38597 | 2.549321 | 2.176326 |
| PCTUC_477 | 2.846882 | 2.862958 | 2.415767 | 2.441686 | 2.023011 |
| PCTUC_478 | 1.198274 | 6.471813 | 2.447198 | 2.589143 | 2.060662 |
| PCTUC_479 | 6.380529 | 6.312082 | 2.940724 | 2.148456 | 2.107159 |
| PCTUC_480 | 3.605897 | 2.601701 | 2.728055 | 2.094268 | 1.77564 |
| PCTUC_481 | 4.150877 | 2.25544 | 2.163176 | 2.125869 | 1.578758 |
| PCTUC_482 | 4.905541 | 6.253034 | 2.660336 | 2.411183 | 1.90211 |
| PCTUC_483 | 3.804823 | 4.135355 | 1.910409 | 2.431383 | 1.665717 |
| PCTUC_484 | 2.982269 | 2.854497 | 1.857548 | 1.770715 | 1.687256 |
| PCTUC_485 | 2.400091 | 2.499066 | 2.048137 | 2.125371 | 1.763658 |
| PCTUC_486 | 5.368877 | 6.171281 | 2.094893 | 2.564498 | 1.828952 |
| PCTUC_487 | 4.33764 | 3.811306 | 2.244857 | 2.606614 | 1.838906 |
| PCTUC_488 | 5.781398 | 4.944817 | 2.550974 | 2.317226 | 1.946061 |
| PCTUC_489 | 4.129999 | 4.597306 | 2.073404 | 2.376219 | 1.772075 |
| PCTUC_490 | 2.533209 | 2.249715 | 1.902172 | 2.280487 | 1.291751 |
| PCTUC_491 | 4.349143 | 3.271342 | 1.968882 | 2.122043 | 1.913929 |
| PCTUC_492 | 3.442778 | 3.200904 | 2.026083 | 2.070875 | 1.888175 |
| PCTUC_493 | 2.000497 | 3.239336 | 1.994512 | 1.847443 | 1.764806 |
| PCTUC_494 | 2.670316 | 2.293422 | 1.684396 | 1.868083 | 1.564883 |
| PCTUC_495 | 1.597283 | 1.984764 | 1.610974 | 1.99927 | 1.399811 |
| PCTUC_496 | 1.775757 | 1.56946 | 1.436648 | 2.088016 | 1.193644 |
| PCTUC_497 | 2.093349 | 1.9671 | 2.180265 | 2.309402 | 1.536103 |
| PCTUC_498 | 2.722987 | 2.821209 | 2.018141 | 2.142493 | 1.737708 |
| PCTUC_499 | 2.779592 | 2.158303 | 1.893526 | 2.309402 | 1.44936 |
| PCTUC_500 | 3.574841 | 3.073884 | 2.401034 | 2.240357 | 2.004712 |
| PCTUC_501 | 2.54213 | 2.105277 | 2.337602 | 2.628652 | 2.246022 |
| PCTUC_502 | 2.178911 | 2.285843 | 1.789459 | 2.164132 | 1.590264 |
| PCTUC_503 | 2.414157 | 1.944002 | 1.772574 | 2.32658 | 1.672217 |
| PCTUC_504 | 2.463425 | 2.447765 | 2.163759 | 2.089343 | 1.930668 |
| PCTUC_505 | 2.12314 | 1.912607 | 1.443313 | 1.437833 | 1.400606 |
| PCTUC_506 | 2.791865 | 2.085928 | 1.808019 | 2.124345 | 2.001914 |
| PCTUC_507 | 1.894859 | 1.972295 | 1.660342 | 1.781779 | 1.749316 |
| PCTUC_508 | 1.639329 | 2.087199 | 1.918195 | 1.927565 | 1.960287 |
| PCTUC_509 | 1.92661 | 2.409046 | 1.17896 | 2.502893 | 1.697634 |
| PCTUC_510 | 2.74997 | 2.181224 | 1.981297 | 2.163146 | 1.72972 |
| PCTUC_511 | 2.141737 | 2.395646 | 2.027365 | 2.038215 | 1.75701 |
| PCTUC_512 | 2.174905 | 1.714814 | 2.488783 | 2.689739 | 1.448017 |
| PCTUC_513 | 3.039541 | 2.820119 | 2.028585 | 2.125969 | 2.057135 |
| PCTUC_514 | 3.052588 | 2.991949 | 2.247591 | 2.51345 | 2.333359 |
| PCTUC_515 | 2.034073 | 2.038699 | 1.665666 | 1.59906 | 1.481016 |
| PCTUC_516 | 2.264423 | 2.08314 | 2.138243 | 2.297952 | 1.845813 |
| PCTUC_517 | 4.065478 | 3.998617 | 2.456918 | 2.576724 | 2.081958 |
| PCTUC_518 | 5.685041 | 1.377179 | 2.230373 | 2.437649 | 1.905197 |
| PCTUC_519 | 4.014813 | 3.038095 | 2.627206 | 2.849769 | 2.049812 |
| PCTUC_520 | 2.454347 | 2.33136 | 2.101032 | 2.413781 | 1.580209 |
| PCTUC_521 | 4.696158 | 3.993624 | 1.967548 | 2.5262 | 1.740719 |
| PCTUC_522 | 2.955145 | 3.214377 | 2.28823 | 2.614905 | 2.264642 |
| PCTUC_523 | 2.031883 | 2.267176 | 1.740335 | 2.357091 | 1.943224 |
| PCTUC_524 | 3.117527 | 3.173575 | 1.999416 | 2.450931 | 1.852275 |
| PCTUC_525 | 2.676281 | 2.769179 | 1.85005 | 1.882107 | 1.618436 |
| PCTUC_526 | 1.666611 | 2.198318 | 1.581107 | 2.010444 | 1.593466 |
| PCTUC_527 | 6.939546 | 6.183732 | 3.480864 | 2.834689 | 2.319295 |
| PCTUC_528 | 4.949556 | 4.691981 | 3.093936 | 2.604392 | 2.059476 |
| PCTUC_529 | 2.075038 | 1.719615 | 1.560014 | 1.896456 | 1.631452 |
| PCTUC_530 | 4.147139 | 3.497023 | 2.339375 | 2.565444 | 2.050107 |
| PCTUC_531 | 2.343305 | 2.01423 | 2.036322 | 2.090427 | 1.881663 |
| PCTUC_532 | 4.510367 | 4.525547 | 2.959393 | 2.010432 | 1.662161 |
| PCTUC_533 | 3.849342 | 3.696642 | 2.538885 | 2.515058 | 2.033303 |
| PCTUC_534 | 1.767598 | 2.102775 | 1.631302 | 2.020012 | 1.818509 |
| PCTUC_535 | 4.195316 | 4.086377 | 2.345238 | 2.621754 | 1.959155 |
| PCTUC_536 | 6.243456 | 2.785664 | 2.43465 | 2.10029 | 2.731689 |
| PCTUC_537 | 5.38413 | 4.90169 | 2.114623 | 2.51 | 2.008325 |
| PCTUC_538 | 2.602264 | 2.538037 | 2.19584 | 2.023753 | 1.577312 |
| PCTUC_539 | 3.54853 | 2.237731 | 2.088234 | 2.511449 | 1.925883 |
| PCTUC_540 | 2.888831 | 2.882751 | 2.434141 | 2.23018 | 1.710604 |
| PCTUC_541 | 3.269265 | 2.895229 | 2.268465 | 2.370985 | 1.904343 |
| PCTUC_542 | 2.44896 | 2.29352 | 2.003177 | 2.059909 | 2.051723 |
| PCTUC_543 | 2.512787 | 1.711784 | 2.086737 | 2.002021 | 1.785412 |
| PCTUC_544 | 2.681708 | 2.466954 | 2.712077 | 2.575649 | 2.445763 |
| PCTUC_545 | 2.533259 | 2.391037 | 2.119718 | 2.084042 | 1.633101 |
| PCTUC_546 | 2.556877 | 2.404527 | 2.076303 | 2.310916 | 2.3094 |
| PCTUC_547 | 2.186541 | 2.087202 | 1.802749 | 2.354466 | 1.737011 |
| PCTUC_548 | 2.414651 | 2.029257 | 2.061789 | 2.085276 | 1.74288 |
| PCTUC_549 | 1.670813 | 1.868073 | 1.944966 | 1.7995 | 3.077506 |
| PCTUC_550 | 2.035058 | 2.595207 | 2.075765 | 2.609532 | 1.910092 |
| PCTUC_551 | 2.274966 | 2.047911 | 1.7206 | 2.051094 | 1.47953 |
| PCTUC_552 | 2.638577 | 2.758001 | 2.067063 | 2.31942 | 1.843889 |
| PCTUC_553 | 2.981036 | 2.50471 | 1.883204 | 2.115905 | 1.82132 |
| PCTUC_554 | 2.436244 | 2.485835 | 1.824445 | 2.12429 | 1.804349 |
| PCTUC_555 | 2.944834 | 2.212094 | 1.637195 | 2.050716 | 1.812436 |
| PCTUC_556 | 2.714275 | 2.715855 | 1.841325 | 2.15853 | 2.076278 |
| PCTUC_557 | 3.131188 | 2.954755 | 2.162656 | 2.40551 | 1.870438 |
| PCTUC_558 | 2.132947 | 2.228063 | 1.419358 | 1.864631 | 1.463866 |
| PCTUC_559 | 2.332394 | 2.15486 | 1.495926 | 1.887638 | 1.915631 |
| PCTUC_560 | 3.196013 | 2.914045 | 2.145384 | 2.59745 | 1.823627 |
| PCTUC_561 | 2.1513 | 1.96924 | 1.761033 | 1.414338 | −1.168462 |
| PCTUC_562 | 1.659784 | 1.154773 | 1.048913 | 1.024868 | −1.336392 |
| PCTUC_563 | 2.585276 | 2.190079 | 1.313003 | 1.250177 | −1.309359 |
| PCTUC_564 | 2.817678 | 3.787903 | 1.135624 | 1.872162 | 1.369615 |
| PCTUC_565 | 1.641978 | 1.358107 | −1.036329 | 1.016858 | −1.118048 |
| PCTUC_566 | 1.548184 | 1.57239 | 1.177027 | 1.234061 | −1.024877 |
| PCTUC_568 | 1.654475 | 1.291164 | 1.043306 | 1.184206 | −1.104657 |
| PCTUC_569 | 1.405539 | 2.485698 | 1.313684 | −1.19257 | 1.149279 |
| PCTUC_570 | 1.676607 | 1.560754 | 1.085764 | 1.030557 | −1.101693 |
| PCTUC_571 | 1.513431 | 2.937735 | 2.57267 | 2.722686 | 1.00085 |
| PCTUC_572 | 1.663791 | −1.06477 | 1.593715 | 2.486905 | 1.926183 |
| PCTUC_573 | 1.767246 | 1.481849 | −1.021755 | 1.165484 | −1.078355 |
| PCTUC_574 | 1.291006 | 1.252516 | 1.008709 | 1.066555 | −1.042773 |
| PCTUC_575 | 1.69959 | 1.726639 | 1.383058 | 1.334899 | −1.044352 |
| PCTUC_576 | 1.858294 | 1.387836 | 1.157076 | 1.364982 | 1.10785 |
| PCTUC_577 | 1.900154 | 1.671832 | 1.240975 | 1.305402 | −1.030198 |
| PCTUC_578 | 2.089452 | 1.667765 | 1.670322 | 1.539216 | −1.080703 |
| PCTUC_579 | 3.319847 | 3.063403 | 2.058318 | 1.82173 | −1.477657 |
| PCTUC_580 | 2.527649 | 1.235273 | 1.142485 | 1.536292 | −1.102233 |
| PCTUC_581 | 4.171175 | 1.930353 | 1.289021 | 1.280861 | 1.790144 |
| PCTUC_582 | 2.060718 | 2.143747 | 2.221659 | −1.132255 | 1.311752 |
| PCTUC_583 | 1.955715 | 2.752954 | 2.15881 | 1.1520894 | −1.178174 |
| PCTUC_584 | 1.368932 | 1.918412 | 2.436657 | 2.091652 | 1.266287 |
| PCTUC_585 | 3.066615 | 1.758414 | 3.530922 | 2.242071 | 1.113677 |
| PCTUC_586 | 2.625219 | 2.259675 | 1.576642 | 1.534752 | −1.178215 |
| PCTUC_587 | 2.562503 | 1.885402 | 2.097867 | 2.085679 | −1.083323 |
| PCTUC_588 | 1.908116 | 1.08511 | 1.324322 | 1.262651 | −1.337089 |
| PCTUC_589 | 1.973591 | 1.75518 | 1.465789 | 1.763982 | 1.125532 |
| PCTUC_590 | 2.289264 | 1.587785 | 1.488175 | 1.429079 | 1.038875 |
| PCTUC_591 | 2.166435 | 1.574134 | 2.066997 | 1.512965 | 1.347126 |
| PCTUC_592 | 2.391229 | 1.668447 | 2.206781 | 1.895666 | 1.297054 |
| PCTUC_593 | 2.993244 | 2.143421 | 1.786839 | 1.82173 | 1.211386 |
| PCTUC_594 | 2.266927 | 1.81015 | 1.432413 | 1.377111 | 1.069318 |
| PCTUC_595 | 1.529021 | 1.283073 | −1.078631 | 1.000447 | −1.157923 |
| PCTUC_596 | 1.972231 | 1.668146 | 1.377539 | 1.459993 | −1.060956 |
| PCTUC_597 | 2.14585 | 4.201519 | 2.722095 | 1.036502 | 1.011944 |
| PCTUC_598 | 2.354877 | 1.619132 | 1.433926 | 1.77209 | −1.100912 |
| PCTUC_599 | 2.414222 | 2.455986 | 1.397936 | 1.834194 | 1.076061 |
| PCTUC_600 | 1.898288 | 2.353238 | 2.2936 | 2.959539 | 1.338679 |
| PCTUC_601 | 2.799655 | 4.394316 | 1.374927 | 1.371902 | −1.181136 |
| PCTUC_602 | 1.966814 | 2.086259 | 1.620849 | 1.557261 | 1.013303 |
| PCTUC_603 | 5.415817 | −1.825225 | 4.445374 | 7.686296 | −1.623484 |
| PCTUC_604 | 4.548471 | 3.68559 | 1.787653 | 2.5105 | −1.029682 |
| PCTUC_605 | 2.45415 | 2.507529 | 1.857248 | 3.294002 | 1.253527 |
| PCTUC_606 | 1.457075 | 2.362059 | 2.69411 | 1.668789 | 1.28103 |
| PCTUC_607 | 2.371922 | 1.77947 | 1.71337 | 1.366738 | −1.082459 |
| PCTUC_608 | 2.356047 | 2.154961 | 2.013607 | 1.76495 | 1.503782 |
| PCTUC_609 | 3.341621 | 2.040385 | 1.907361 | 1.673439 | 1.192257 |
| PCTUC_610 | 6.863899 | 3.046129 | 3.930916 | 2.956858 | 1.672432 |
| PCTUC_611 | 1.772479 | 3.18666 | 1.441249 | 1.51261 | 1.350461 |
| PCTUC_612 | 2.453625 | 2.656935 | 1.42877 | 1.68846 | 1.177155 |
| PCTUC_613 | 2.322756 | 1.295258 | 1.398793 | 1.632847 | 1.081717 |
| PCTUC_614 | 2.105337 | 2.060017 | 1.605743 | 1.710592 | 1.31056 |
| PCTUC_615 | 2.061213 | 2.15023 | 1.301226 | 1.267069 | 1.225575 |
| PCTUC_616 | 2.308388 | 1.574555 | 1.407101 | 1.429502 | 1.100921 |
| PCTUC_617 | 1.576303 | 1.238666 | 1.102804 | 1.104352 | 1.037544 |
| PCTUC_618 | 5.2704 | 3.445125 | 2.291641 | 2.158062 | 1.304951 |
| PCTUC_619 | 3.6311 | 1.682945 | 2.344108 | 2.325649 | 1.262526 |
| PCTUC_620 | 2.279748 | 1.49322 | 1.640359 | 1.400027 | 1.118628 |
| PCTUC_621 | 2.725315 | 2.27424 | 1.951459 | 1.822087 | 1.321089 |
| PCTUC_622 | 3.367776 | 2.442924 | 2.535629 | 2.154737 | 1.430283 |
| PCTUC_623 | 3.551299 | 2.625053 | 1.846458 | 2.015363 | 1.363958 |
| PCTUC_624 | 2.990381 | 1.391522 | 1.569815 | 2.308152 | 1.489686 |
| PCTUC_625 | 3.241178 | 2.398982 | 1.696991 | 2.166973 | 1.479425 |
| PCTUC_626 | 4.263879 | 3.245743 | 2.479307 | 2.482792 | 1.639614 |
| PCTUC_627 | 2.120695 | 1.950867 | 1.15705 | 1.526368 | 1.375283 |
| PCTUC_628 | 2.234193 | 1.721639 | 1.572728 | 1.672325 | 1.329832 |
| PCTUC_629 | 2.645262 | 2.009622 | 1.87541 | 2.068085 | 1.504461 |
| PCTUC_630 | 2.896469 | 2.463484 | 1.901627 | 1.923349 | 1.147038 |
| PCTUC_631 | 2.064842 | 1.621446 | 1.339284 | 1.385534 | 1.301967 |
| PCTUC_632 | 1.955281 | 1.482409 | 1.149627 | 1.092045 | 1.111003 |
| PCTUC_633 | 2.089976 | 1.619433 | 1.290514 | 1.629664 | 1.165089 |
| PCTUC_634 | 2.999586 | 1.967814 | 1.3107 | 1.652533 | 1.417344 |
| PCTUC_635 | 2.765555 | 1.540217 | 1.356881 | 1.681852 | 1.160647 |
| PCTUC_636 | 1.97347 | 1.371112 | 1.547874 | 1.554828 | 1.186887 |
| PCTUC_637 | 1.900493 | 1.412755 | 1.229323 | 1.277215 | −1.006073 |
| PCTUC_638 | 2.561628 | 1.908089 | 1.464314 | 1.384407 | 1.220221 |
| PCTUC_639 | 2.060063 | 1.545589 | 1.45735 | 1.561649 | 1.582865 |
| PCTUC_640 | 3.636007 | 2.997755 | 2.108412 | 2.242866 | 1.648748 |
| PCTUC_641 | 4.679021 | 3.565046 | 2.195632 | 2.465471 | 1.670103 |
| PCTUC_642 | 3.39597 | 2.37976 | 1.849144 | 2.319398 | 1.659982 |
| PCTUC_643 | 2.769052 | 2.057714 | 1.999222 | 2.00004 | 1.418435 |
| PCTUC_644 | 3.130126 | 1.843459 | 1.786604 | 1.997668 | 1.446098 |
| PCTUC_645 | 2.248375 | 2.071626 | 1.630426 | 1.708583 | 1.466932 |
| PCTUC_646 | 2.482285 | 2.26653 | 1.393158 | 1.702992 | 1.361391 |
| PCTUC_647 | 2.157234 | 1.842401 | 1.396858 | 1.534424 | 1.129591 |
| PCTUC_648 | 1.696494 | 1.639976 | 1.340072 | 1.360999 | 1.36889 |
| PCTUC_649 | 3.796501 | 3.261933 | 2.28008 | 2.205014 | 1.615482 |
| PCTUC_650 | 3.289895 | 3.550014 | 1.972488 | 1.88842 | 1.351876 |
| PCTUC_651 | 1.996156 | 1.805128 | 1.404317 | 1.432118 | 1.394295 |
| PCTUC_652 | 4.039923 | 3.381759 | 2.282342 | 2.25035 | 1.624183 |
| PCTUC_653 | 4.071556 | 3.266201 | 2.354722 | 2.154996 | 1.544724 |
| PCTUC_654 | 1.984298 | 1.555235 | 1.53037 | 1.545385 | 1.389834 |
| PCTUC_655 | 2.574506 | 1.984158 | 1.59359 | 1.721093 | 1.11024 |
| PCTUC_656 | 2.892828 | 2.117047 | 1.873724 | 1.873271 | 1.416158 |
| PCTUC_657 | 2.411529 | 1.795964 | 1.78192 | 2.371935 | 1.692294 |
| PCTUC_658 | 2.09202 | 1.744102 | 1.745396 | 1.762151 | 1.482022 |
| PCTUC_659 | 2.575266 | 2.124049 | 1.560475 | 1.727308 | 1.270648 |
| PCTUC_660 | 2.520167 | 1.745141 | 1.594287 | 1.69775 | 1.350521 |
| PCTUC_661 | 2.134085 | 1.940671 | 1.53473 | 1.50667 | 1.288514 |
| PCTUC_662 | 4.724458 | 3.946936 | 2.465677 | 2.121572 | 1.348008 |
| PCTUC_663 | 3.248355 | 3.44881 | 1.944542 | 1.979683 | 1.275257 |
| PCTUC_664 | 2.197084 | 1.883653 | 1.327784 | 1.438995 | 1.167273 |
| PCTUC_665 | 3.614111 | 1.87647 | 2.062585 | 2.114008 | 1.184832 |
| PCTUC_666 | 5.643526 | 4.451371 | 2.833776 | 2.63493 | 1.439823 |
| PCTUC_667 | 2.185947 | 1.815849 | 1.536835 | 1.63991 | 1.30789 |
| PCTUC_668 | 1.913589 | 1.460395 | 1.120916 | 1.262651 | 1.194898 |
| PCTUC_669 | 2.221644 | 2.111672 | 1.170494 | 1.612767 | 1.245904 |
| PCTUC_670 | 1.803643 | 1.555918 | 1.270898 | 1.483201 | 1.452556 |
| PCTUC_671 | 1.667533 | 1.414151 | 1.012784 | 1.153869 | 1.035625 |
| PCTUC_672 | 3.765201 | 4.324469 | 2.213268 | 1.789587 | 1.390585 |
| PCTUC_673 | 2.413774 | 1.597572 | 1.470126 | 1.148103 | 1.251977 |
| PCTUC_674 | 4.901073 | 3.630356 | 2.421033 | 2.328926 | 1.511821 |
| PCTUC_675 | 2.02757 | 1.687118 | 1.462588 | 1.634331 | 1.275855 |
| PCTUC_676 | 1.919538 | 1.742238 | 1.581826 | 1.585945 | 1.31395 |
| PCTUC_677 | 2.011766 | 1.351125 | 1.310936 | 1.382537 | 1.077973 |
| PCTUC_678 | 2.721872 | 1.77266 | 1.812868 | 1.940869 | 1.428293 |
| PCTUC_679 | 2.092978 | 1.779302 | 1.515586 | 1.668664 | 1.36376 |
| PCTUC_680 | 2.760168 | 1.714808 | 1.395004 | 1.473272 | 1.462381 |
| PCTUC_681 | 3.005869 | 1.905482 | 1.623226 | 1.913392 | 1.464779 |
| PCTUC_682 | 2.932731 | 2.279735 | 1.696851 | 1.844617 | 1.441928 |
| PCTUC_683 | 2.931927 | 2.512429 | 1.638134 | 1.535175 | 1.35907 |
| PCTUC_684 | 3.377182 | 2.464607 | 2.122759 | 2.173514 | 1.549637 |
| PCTUC_685 | 2.92051 | 1.826244 | 2.23447 | 2.417694 | 1.675354 |
| PCTUC_686 | 3.751326 | 2.864389 | 1.669852 | 1.850708 | 1.330981 |
| PCTUC_687 | 2.542475 | 1.384002 | 2.253859 | 2.250025 | 1.424351 |
| PCTUC_688 | 2.500217 | 1.454033 | 1.51167 | 1.553329 | 1.572351 |
| PCTUC_689 | 2.798229 | 1.898112 | 1.7912 | 1.784557 | 1.556316 |
| PCTUC_690 | 3.62354 | 2.586582 | 1.978384 | 2.035194 | 1.708843 |
| PCTUC_691 | 1.980327 | 1.529974 | 1.627668 | 1.647607 | 1.52965 |
| PCTUC_692 | 2.207429 | 2.023349 | 1.621345 | 1.557046 | 1.375703 |
| PCTUC_693 | 2.573091 | 1.854801 | 1.521731 | 1.559489 | 1.622517 |
| PCTUC_694 | 2.661108 | 1.611918 | 1.733396 | 1.820798 | 1.583537 |
| PCTUC_695 | 3.084925 | 1.906792 | 1.716335 | 1.835684 | 1.446206 |
| PCTUC_696 | 3.436488 | 2.050998 | 1.556213 | 1.780796 | 1.26221 |
| PCTUC_697 | 2.846267 | 2.169852 | 1.739728 | 1.886953 | 1.394527 |
| PCTUC_698 | 2.902011 | 2.257164 | 1.820701 | 1.706544 | 1.408133 |
| PCTUC_699 | 4.827313 | 4.018908 | 2.272471 | 2.292536 | 1.480471 |
| PCTUC_700 | 2.390521 | 1.464474 | 1.576155 | 1.860255 | 1.427529 |
| PCTUC_701 | 3.311536 | 2.376002 | 1.731801 | 1.61275 | 1.301387 |
| PCTUC_702 | 2.624016 | 2.448785 | 1.653695 | 1.713574 | 1.383952 |
| PCTUC_703 | 5.139153 | 4.081909 | 2.450374 | 2.374609 | 1.702067 |
| PCTUC_704 | 2.309258 | 2.014421 | 1.651519 | 1.676327 | 1.409805 |
| PCTUC_705 | 2.665751 | 1.414355 | 1.617702 | 1.691659 | 1.355501 |
| PCTUC_706 | 2.287762 | 1.813085 | 1.379834 | 1.514168 | 1.28103 |
| PCTUC_707 | 4.413056 | 2.800452 | 1.930365 | 2.110764 | 1.410492 |
| PCTUC_708 | 2.598162 | 1.997955 | 1.603416 | 1.690229 | 1.241806 |
| PCTUC_709 | 4.610568 | 3.121099 | 1.945206 | 2.056421 | 1.340026 |
| PCTUC_710 | 3.801278 | 3.21265 | 1.997177 | 1.977971 | 1.311692 |
| PCTUC_711 | 2.359209 | 1.549437 | 1.459169 | 1.554681 | 1.345212 |
| PCTUC_712 | 2.518226 | 1.681685 | 1.821278 | 1.801401 | 1.557828 |
| PCTUC_713 | 3.620613 | 2.880119 | 1.938276 | 2.031514 | 1.295043 |
| PCTUC_714 | 2.705708 | 2.028827 | 1.58479 | 1.802496 | 1.267622 |
| PCTUC_715 | 2.566382 | 1.848065 | 1.289421 | 1.405011 | 1.082506 |
| PCTUC_716 | 5.121842 | 4.239795 | 2.482671 | 2.399158 | 1.467867 |
| PCTUC_717 | 2.995538 | 2.487843 | 1.807189 | 2.102638 | 1.598794 |
| PCTUC_718 | 3.134496 | 2.21508 | 2.111608 | 2.288491 | 1.542992 |
| PCTUC_719 | 2.800922 | 2.135409 | 1.739122 | 1.755105 | −1.152661 |
| PCTUC_720 | 3.266792 | 1.098088 | 1.647018 | 2.574326 | 1.945548 |
| PCTUC_721 | 2.279879 | 1.470384 | 1.464171 | 1.332593 | 2.18729 |
| PCTUC_722 | 2.864947 | 2.957419 | 1.898244 | 2.449121 | 2.823838 |
| PCTUC_723 | 2.936209 | 1.665902 | 1.822441 | 2.500832 | 2.126406 |
| PCTUC_724 | 6.322812 | 4.141862 | 3.652369 | 2.620724 | 1.336264 |
| PCTUC_725 | 3.180355 | 5.149987 | 5.441726 | 3.571592 | 4.900834 |
| PCTUC_726 | 2.312671 | 3.094301 | 1.870246 | 1.929492 | 4.47831 |
| PCTUC_727 | 3.400119 | 5.56307 | 2.538855 | 4.798176 | 1.16597 |
| PCTUC_728 | 2.245501 | 2.481267 | 1.936934 | 2.452436 | 2.517091 |
| PCTUC_729 | 3.68157 | 2.719935 | 4.756963 | 4.780087 | 2.451955 |
| PCTUC_730 | 2.54578 | 1.70516 | 1.376145 | 1.063746 | 1.484946 |
| PCTUC_731 | 1.650166 | 2.149801 | 2.230358 | −1.192853 | 3.374881 |
| PCTUC_732 | 1.173051 | 2.470797 | 1.96913 | 2.981646 | 4.636403 |
| PCTUC_733 | 1.545922 | 2.714017 | 2.174145 | 1.535983 | 1.445219 |
| PCTUC_734 | 6.250961 | 2.613591 | 2.367622 | 1.395285 | 3.012707 |
| PCTUC_735 | 1.941943 | −1.154395 | 1.336703 | 2.721427 | 2.473974 |
| PCTUC_736 | 2.193176 | 1.875473 | 2.309137 | 2.229304 | 1.749662 |
| PCTUC_737 | 2.341751 | 1.418063 | 2.449272 | 2.472956 | 1.947165 |
| PCTUC_738 | 2.088114 | 1.828001 | 5.574064 | 6.420503 | 2.571054 |
| PCTUC_739 | 1.909534 | 2.02831 | 2.202837 | 1.52346 | 2.025769 |
| PCTUC_740 | 1.957884 | 2.764184 | 3.193176 | 2.302767 | 1.341441 |
| PCTUC_741 | 1.431072 | 2.457295 | 2.102171 | 1.919661 | 3.254123 |
| PCTUC_742 | 2.752174 | 2.719285 | 2.902712 | 1.786477 | 3.561341 |
| PCTUC_743 | 2.374025 | 2.252629 | 1.611526 | 1.306457 | 2.242702 |
| PCTUC_744 | 2.208758 | 1.106154 | 2.55469 | 1.622825 | 2.047873 |
| PCTUC_745 | 2.619822 | 2.234076 | 2.125212 | 1.175748 | 1.801113 |
| PCTUC_746 | −2.604011 | −4.336377 | −1.289437 | −2.013778 | 4.400435 |
| PCTUC_747 | 1.996631 | −1.253024 | −1.283601 | 1.034031 | 3.964703 |
| PCTUC_748 | 1.378674 | 2.536747 | 3.586713 | 1.966716 | 1.091169 |
| PCTUC_749 | 2.69839 | 5.340216 | 3.960504 | 1.565272 | 1.828033 |
| PCTUC_750 | 3.70196 | 4.375464 | 1.684335 | 1.790254 | 2.591611 |
| PCTUC_751 | 1.434497 | 2.616543 | 2.421894 | 1.107728 | 1.966931 |
| PCTUC_752 | 2.611563 | 2.241413 | 2.252592 | 1.833555 | 9.644817 |
| PCTUC_753 | 1.172065 | 1.9564 | 2.087169 | 2.44259 | 1.617989 |
| PCTUC_754 | 3.315586 | 5.507189 | 2.818951 | 1.428701 | 2.854979 |
| PCTUC_755 | 1.385515 | 2.299191 | 2.11237 | 1.901943 | 1.481955 |
| PCTUC_756 | 1.513908 | 1.812244 | 2.275906 | 1.890749 | 2.026129 |
| PCTUC_757 | 4.822169 | 3.194647 | 2.069062 | 6.764375 | 1.062056 |
| PCTUC_758 | 1.931267 | 2.721672 | 3.427641 | 2.313735 | 2.068174 |
| PCTUC_759 | 2.034523 | 1.959083 | 2.928546 | 3.031246 | 1.546934 |
| PCTUC_760 | 1.498347 | 2.639704 | 2.019559 | −1.061474 | 1.700927 |
| PCTUC_761 | 1.584407 | 1.682904 | 3.221693 | 2.118881 | 3.939364 |
| PCTUC_762 | 2.547231 | −1.006767 | 1.712516 | 3.774214 | 3.514404 |
| PCTUC_763 | 2.682344 | 2.138069 | 2.196179 | 1.553065 | 2.311897 |
| PCTUC_764 | 1.903514 | 1.984084 | 1.90328 | 1.87638 | 2.203765 |
| PCTUC_765 | 2.765059 | 2.873031 | 2.372725 | 1.795411 | 2.257401 |
| PCTUC_766 | 2.970002 | 1.421156 | 2.223881 | 2.091841 | 2.138762 |
| PCTUC_767 | 3.131984 | 1.92316 | 2.102419 | 1.974468 | 2.576102 |
| PCTUC_768 | 2.021438 | 1.613102 | 2.162979 | 2.390166 | 1.978501 |
| PCTUC_769 | 2.666843 | 2.697247 | 3.103855 | 1.741283 | 2.923714 |
| PCTUC_770 | 2.126302 | 1.367927 | 1.821058 | 2.06508 | 1.92668 |
| PCTUC_771 | 9.066208 | 2.301069 | 32.466282 | 9.306285 | 2.641976 |
| PCTUC_772 | 2.542206 | 2.138214 | 2.170891 | 2.752532 | 1.818219 |
| PCTUC_773 | 2.140708 | 1.910514 | 1.868318 | 1.171023 | 1.791513 |
| PCTUC_774 | 2.170943 | 1.04411 | 1.569475 | 1.657634 | 2.391124 |
| PCTUC_775 | 1.67631 | 1.744011 | 1.153107 | 1.063258 | 2.223874 |
| PCTUC_776 | 1.180588 | 2.774556 | 1.708677 | −1.116192 | 2.445475 |
| PCTUC_777 | 2.2542 | 2.193221 | 1.918728 | 1.949192 | 1.985048 |
| PCTUC_778 | 2.304341 | 1.986533 | 2.36534 | 2.001854 | 2.164915 |
| PCTUC_779 | 3.319706 | 7.10986 | 4.295543 | 1.431373 | 3.739748 |
| PCTUC_780 | 2.182786 | 2.654104 | 2.052293 | 1.226816 | 1.797102 |
| PCTUC_781 | 2.002184 | 2.124835 | 2.563484 | 2.123987 | 1.910713 |
| PCTUC_782 | 1.982726 | 2.339215 | 2.723196 | 1.605118 | 2.213815 |
| PCTUC_783 | 5.412443 | 3.235496 | 5.063339 | 2.247368 | 4.10765 |
| PCTUC_784 | 1.523491 | 1.954146 | 2.511079 | 1.829886 | 2.085814 |
| PCTUC_785 | 3.088835 | 3.454606 | 4.478419 | 4.437982 | 2.777349 |
| PCTUC_786 | 3.020984 | 2.177902 | 1.285365 | 1.111271 | 2.810368 |
| PCTUC_787 | 1.579647 | 2.126352 | 2.621198 | 1.891533 | 3.694917 |
| PCTUC_788 | 1.989318 | 1.677531 | 1.929438 | 3.418436 | 2.037659 |
| PCTUC_789 | 2.948468 | 3.183348 | 2.201415 | 2.286198 | 2.866979 |
| PCTUC_790 | 2.147948 | 1.806976 | 2.417625 | 2.035112 | 1.626123 |
| PCTUC_791 | 1.986498 | 2.576382 | 1.954842 | 1.568862 | 1.966789 |
| PCTUC_792 | 3.196796 | 3.486831 | 3.260377 | 2.264079 | 2.886792 |
| PCTUC_793 | 3.769532 | 4.108984 | 3.562748 | 2.284717 | 3.681486 |
| PCTUC_794 | 2.002344 | 1.894897 | 1.788498 | 1.56391 | 2.133116 |
| PCTUC_795 | 3.044567 | 3.152989 | 3.166747 | 1.968495 | 2.934963 |
| PCTUC_796 | 3.184995 | 3.117129 | 3.047694 | 2.60312 | 8.595053 |
| PCTUC_797 | 3.851431 | 4.428571 | 4.33976 | 2.782248 | 3.783499 |
| PCTUC_798 | 3.482885 | 4.161508 | 3.216578 | 2.304008 | 3.654118 |
| PCTUC_799 | 5.14745 | 5.773758 | 4.428958 | 2.696134 | 4.204111 |
| PCTUC_800 | 4.496764 | 4.59942 | 4.781262 | 2.728859 | 4.622788 |
| PCTUC_801 | 4.790975 | 6.2401 | 5.334881 | 2.849744 | 5.284999 |
| PCTUC_802 | 4.483533 | 5.933342 | 4.402905 | 2.849242 | 4.738077 |
| PCTUC_803 | 3.927758 | 5.220841 | 5.310245 | 2.649704 | 4.138473 |
| PCTUC_804 | 2.382821 | 2.906737 | 2.819774 | 2.152793 | 2.339993 |
| PCTUC_805 | 2.018582 | 2.140931 | 2.448375 | 2.322326 | 2.203802 |
| PCTUC_806 | 3.712907 | 4.013764 | 4.981676 | 2.92389 | 3.971395 |
| PCTUC_807 | 2.668381 | 3.176708 | 3.365095 | 3.510781 | 2.829598 |
| PCTUC_808 | 5.563641 | 6.477875 | 5.692748 | 2.900728 | 5.47545 |
| PCTUC_809 | 3.700055 | 3.973909 | 4.959146 | 2.291433 | 2.488166 |
| PCTUC_810 | 2.242853 | 2.325493 | 2.37969 | 1.993197 | 2.071771 |
| PCTUC_811 | 3.831634 | 4.074454 | 3.860348 | 2.405638 | 3.12156 |
| PCTUC_812 | 3.288 | 3.867888 | 3.940192 | 2.396031 | 3.229351 |
| PCTUC_813 | 3.754223 | 3.77283 | 3.865026 | 2.398146 | 3.256464 |
| PCTUC_814 | 4.75541 | 5.228207 | 4.819787 | 2.861704 | 5.149302 |
| PCTUC_815 | 3.892281 | 4.406302 | 4.380984 | 2.8373 | 4.870093 |
| PCTUC_816 | 4.379927 | 4.996663 | 4.362504 | 2.736067 | 5.081002 |
| PCTUC_817 | 3.106359 | 3.238691 | 3.38937 | 2.47535 | 3.133699 |
| PCTUC_818 | 4.434761 | 4.46969 | 4.046491 | 3.016147 | 4.799383 |
| PCTUC_819 | 4.909876 | 5.234096 | 5.850842 | 3.322591 | 5.497626 |
| PCTUC_820 | 2.304303 | 2.138123 | 2.074894 | 2.295133 | 2.166532 |
| PCTUC_821 | 2.834139 | 2.745442 | 2.990574 | 1.933787 | 2.992724 |
| PCTUC_822 | 5.200898 | 6.422604 | 5.118377 | 2.91676 | 5.344371 |
| PCTUC_823 | 2.53588 | 2.995658 | 4.46937 | 2.562591 | 1.622748 |
| PCTUC_824 | 2.933777 | 3.42145 | 3.242542 | 2.405094 | 3.023423 |
| PCTUC_825 | 3.186176 | 2.917574 | 2.62689 | 2.378563 | 3.827872 |
| PCTUC_826 | 1.919053 | 2.475648 | 1.850094 | 1.928537 | 2.086126 |
| PCTUC_827 | 1.904114 | 1.956388 | 1.952929 | 1.326964 | 1.775423 |
| PCTUC_828 | 2.92745 | 3.599613 | 3.223438 | 2.173024 | 3.13715 |
| PCTUC_829 | 1.974123 | 2.175198 | 2.062895 | 1.914626 | 2.036808 |
| PCTUC_830 | 3.077779 | 4.19744 | 2.897306 | 2.005722 | 3.079901 |
| PCTUC_831 | 1.840324 | 2.44461 | 1.915517 | 2.425321 | 1.885715 |
| PCTUC_832 | 2.225947 | 2.367063 | 2.522229 | 1.897432 | 2.548975 |
| PCTUC_833 | 2.858343 | 2.674582 | 2.619268 | 2.118242 | 2.951528 |
| PCTUC_834 | 2.9596 | 2.374317 | 2.542884 | 2.410777 | 3.259532 |
| PCTUC_835 | 3.010594 | 3.311469 | 3.328452 | 2.455323 | 3.43195 |
| PCTUC_836 | 2.007784 | 2.085062 | 2.016944 | 1.841439 | 2.027111 |
| PCTUC_837 | 2.796955 | 2.807929 | 3.865616 | 2.395671 | 3.712218 |
| PCTUC_838 | 1.494369 | 1.963341 | 5.039379 | 2.152365 | 1.19218 |
| PCTUC_839 | 4.239632 | 3.829796 | 4.241501 | 2.527571 | 5.13077 |
| PCTUC_840 | 2.061444 | 1.848708 | 2.171947 | 1.677039 | 2.955164 |
| PCTUC_841 | 2.054037 | 1.62282 | 1.568904 | 1.818563 | 2.585692 |
| PCTUC_842 | 3.325278 | 2.201624 | 2.83394 | 2.779279 | 2.899318 |
| PCTUC_843 | 1.788604 | 2.545392 | 2.462816 | 2.152621 | 2.521353 |
| PCTUC_844 | 2.402184 | 1.850049 | 1.960408 | 2.116551 | 2.600048 |
| PCTUC_845 | 2.50498 | 2.196354 | 2.359953 | 2.038789 | 2.122147 |
| PCTUC_846 | 1.928036 | 1.792006 | 2.050615 | 2.294138 | 2.265651 |
| PCTUC_847 | 2.329573 | 2.669091 | 2.7908 | 2.09974 | 2.517365 |
| PCTUC_848 | 2.48907 | 1.635645 | 3.754775 | 3.079755 | 1.910938 |
| PCTUC_849 | 2.128594 | 2.421387 | 2.235757 | 1.88999 | 2.596102 |
| PCTUC_850 | 2.250095 | 2.870839 | 2.845568 | 1.836877 | 3.054814 |
| PCTUC_851 | 2.480321 | 2.003515 | 2.084979 | 2.261478 | 2.775162 |
| PCTUC_852 | 3.791353 | 2.885709 | 4.59536 | 4.799927 | 1.82336 |
| PCTUC_853 | 2.130593 | 2.395275 | 2.332972 | 3.390371 | 1.420116 |
| PCTUC_854 | 4.050172 | 3.927672 | 3.382661 | 2.926788 | 3.400673 |
| PCTUC_855 | 2.517597 | 4.010342 | 2.627365 | 2.16504 | 2.749827 |
| PCTUC_856 | 4.521049 | 4.759143 | 5.94944 | 3.528028 | 4.510493 |
| PCTUC_857 | 2.118167 | 1.667272 | 1.584278 | 2.004081 | 2.715339 |
| PCTUC_858 | 3.618611 | 3.923041 | 3.748677 | 2.279956 | 4.36315 |
| PCTUC_859 | 2.535355 | 2.672349 | 3.022804 | 2.061067 | 3.411787 |
| PCTUC_860 | 2.018386 | 2.602673 | 2.390009 | 1.920446 | 1.678945 |
| PCTUC_861 | 2.705428 | 2.904839 | 2.577471 | 2.28519 | 2.138755 |
| PCTUC_862 | 2.109637 | 2.062488 | 2.299455 | 1.913848 | 2.063145 |
| PCTUC_863 | 1.402514 | 1.913175 | 2.036407 | 2.504151 | 3.015167 |
| PCTUC_864 | 2.99618 | 3.233393 | 2.876639 | 2.230565 | 3.5081 |
| PCTUC_865 | 2.690218 | 2.717674 | 2.690491 | 1.992791 | 2.795335 |
| PCTUC_866 | 1.996733 | 1.609049 | 2.308326 | 2.546587 | 2.202009 |
| PCTUC_867 | 2.818447 | 3.778686 | 3.51761 | 2.102258 | 3.744934 |
| PCTUC_868 | 1.991561 | 2.991961 | 2.213984 | 1.770526 | 2.169716 |
| PCTUC_869 | 2.25384 | 1.99884 | 2.021969 | 3.166457 | 2.211639 |
| PCTUC_870 | 2.254735 | 1.975595 | 2.232454 | 2.071242 | 2.097088 |
| PCTUC_871 | 2.01151 | 2.790665 | 2.513632 | 1.841401 | 2.546699 |
| PCTUC_872 | 2.010319 | 2.272945 | 2.635181 | 2.545468 | 2.5213 |
| PCTUC_873 | 3.252205 | 2.109674 | 3.160142 | 2.223053 | 2.871609 |
| PCTUC_874 | 1.741674 | 1.985395 | 1.40981 | −1.0323 | 1.717773 |
| PCTUC_875 | 2.694372 | 2.621971 | 2.075549 | 1.654308 | 3.340908 |
| PCTUC_876 | 2.534711 | 2.628107 | 2.776704 | 2.619621 | 2.670912 |
| PCTUC_877 | 2.125987 | 1.825273 | 3.556471 | 2.425424 | 2.202742 |
| PCTUC_878 | 2.143905 | 2.173444 | 2.548723 | 1.926992 | 1.945828 |
| PCTUC_879 | 3.017557 | 3.313776 | 3.23282 | 2.519569 | 4.085382 |
| PCTUC_880 | 2.332958 | 2.74189 | 2.615978 | 1.927811 | 2.540155 |
| PCTUC_881 | 3.719461 | 3.623826 | 3.19083 | 2.295216 | 3.808763 |
| PCTUC_882 | 3.375582 | 3.323253 | 3.632514 | 2.259738 | 3.998963 |
| PCTUC_883 | 3.460237 | 3.49788 | 4.037887 | 2.49328 | 4.323845 |
| PCTUC_884 | 2.009108 | 2.153635 | 2.529886 | 2.029703 | 2.670727 |
| PCTUC_885 | 2.66158 | 2.072809 | 2.160885 | 1.721565 | −1.103153 |
| PCTUC_886 | 2.972494 | 2.924612 | 3.118183 | 2.282334 | 3.49861 |
| PCTUC_887 | 2.027975 | 2.38398 | 2.296002 | 1.924612 | 2.42382 |
| PCTUC_888 | 2.436039 | 3.457342 | 2.737972 | 2.126336 | 1.551599 |
| PCTUC_889 | 2.248439 | 2.221073 | 2.669714 | 2.05175 | 2.822394 |
| PCTUC_890 | 2.203458 | 2.155574 | 2.361843 | 1.701684 | 2.477744 |
| PCTUC_891 | 3.155087 | 2.883648 | 2.752733 | 2.458148 | 3.186105 |
| PCTUC_892 | 2.343731 | 1.338486 | 2.692445 | 2.506622 | 1.907094 |
| PCTUC_893 | 2.915632 | 2.590539 | 3.622392 | 3.905265 | 4.47831 |
| PCTUC_894 | 4.506998 | 3.59058 | 3.962988 | 2.844126 | 4.481072 |
| PCTUC_895 | 2.269523 | 1.780666 | 2.160403 | 2.08125 | 2.08296 |
| PCTUC_896 | 2.865829 | 2.840475 | 2.428004 | 2.385588 | 2.747852 |
| PCTUC_897 | 2.345222 | 1.942502 | 1.96854 | 2.697916 | 1.00369 |
| PCTUC_898 | 2.265094 | 2.938895 | 2.243422 | 2.234162 | 2.681554 |
| PCTUC_899 | 3.240594 | 2.89024 | 3.19629 | 1.643464 | 4.062936 |
| PCTUC_900 | 2.158255 | 2.225039 | 1.958986 | 1.337243 | 2.284375 |
| PCTUC_901 | 1.704198 | 2.000071 | 2.057588 | 2.11317 | 1.742318 |
| PCTUC_902 | 1.700514 | 1.979201 | 2.911566 | 2.402822 | 2.639393 |
| PCTUC_903 | 1.971537 | 1.805452 | 1.941796 | 1.408055 | 2.242712 |
| PCTUC_904 | 2.582627 | 2.451558 | 2.073478 | 1.945297 | 2.805823 |
| PCTUC_905 | 2.486936 | 2.48598 | 2.785518 | 2.234389 | 2.725869 |
| PCTUC_906 | 2.348454 | 3.648733 | 3.524524 | 2.959175 | 3.327241 |
| PCTUC_907 | 4.418301 | 5.429524 | 5.189786 | 2.601276 | 5.046936 |
| PCTUC_908 | 2.923208 | 3.753517 | 3.50064 | 2.171186 | 3.947329 |
| PCTUC_909 | 2.172991 | 2.597694 | 2.453735 | 1.788767 | 2.241053 |
| PCTUC_910 | 1.632832 | 2.259243 | 2.020136 | 1.770561 | 2.368836 |
| PCTUC_911 | 3.628025 | 3.382685 | 3.266242 | 1.433443 | 2.065969 |
| PCTUC_912 | 1.708289 | 4.094818 | 3.834928 | 1.347942 | 2.497629 |
| PCTUC_913 | −1.046016 | 2.240158 | 2.899449 | 3.032311 | 1.341131 |
| PCTUC_914 | −1.027773 | 1.19017 | −1.465852 | −1.152883 | −1.047242 |
| PCTUC_915 | 1.725658 | 1.366501 | 1.683899 | 2.436776 | 2.106251 |
| PCTUC_916 | 1.327684 | 2.027969 | 2.144469 | 2.198778 | 1.659379 |
| PCTUC_917 | 1.483645 | 1.60136 | 2.103386 | 2.447269 | 1.95535 |
| PCTUC_918 | 1.771259 | 1.22116 | 2.070256 | 1.986665 | 1.580713 |
| PCTUC_919 | 2.918718 | 2.124875 | 1.756297 | 1.53907 | 1.104604 |
| PCTUC_920 | 1.897873 | 2.063434 | 1.176537 | 1.403987 | 1.222612 |
| PCTUC_921 | 3.146559 | 1.290703 | 1.689708 | 2.295315 | 2.378711 |
| PCTUC_922 | 1.300489 | 1.381081 | 1.467731 | 2.008957 | 1.973597 |
| PCTUC_923 | 1.191862 | 1.585463 | 1.143061 | 2.031052 | 2.405917 |
| PCTUC_924 | 1.518692 | 3.641808 | 3.494821 | 1.361807 | 1.99471 |
| PCTUC_925 | 2.424894 | 2.040161 | 2.190496 | 2.154025 | 1.278334 |
| PCTUC_926 | 1.072146 | 1.919559 | 2.084503 | 1.99245 | 1.011251 |
| PCTUC_927 | −1.101332 | 1.821126 | 1.98096 | 2.582406 | 1.806138 |
| PCTUC_928 | 1.238585 | 2.209098 | 2.432987 | 2.179409 | 1.149451 |
| PCTUC_929 | 2.16326 | 1.219258 | 1.393823 | 3.200348 | 2.760397 |
| PCTUC_930 | 1.507631 | 2.192262 | 2.35394 | 2.122252 | 1.663228 |
| PCTUC_931 | −1.02405 | 1.359214 | 1.94306 | 2.289215 | 3.077495 |
| PCTUC_932 | 1.975673 | −1.065396 | 1.775844 | 2.857529 | 2.110501 |
| PCTUC_933 | 1.989775 | 2.301899 | 2.211407 | 2.059944 | 1.641539 |
| PCTUC_934 | 2.596033 | 1.930659 | 2.12377 | 1.602472 | 1.913087 |
| PCTUC_935 | 2.121555 | 2.019863 | 3.910625 | 2.859906 | 1.295485 |
| PCTUC_936 | 2.90906 | −1.051498 | 2.174735 | 5.179016 | 4.19084 |
| PCTUC_937 | 2.907178 | 9.230203 | 2.312996 | 1.276643 | 1.504857 |
| PCTUC_938 | 1.899924 | 3.569331 | 2.190631 | 1.89375 | 2.05869 |
| PCTUC_939 | 3.068882 | 2.580992 | 1.638408 | 2.981934 | 11.334661 |
| PCTUC_940 | 4.369292 | 2.150146 | 2.492596 | 2.16282 | 1.811484 |
| PCTUC_941 | 6.789319 | 2.83798 | 2.739652 | −1.141878 | 1.460348 |
| PCTUC_942 | 8.814911 | −2.69703 | 6.393185 | 12.043472 | −1.465271 |
| PCTUC_943 | 2.181615 | 3.609258 | 2.070167 | 1.696407 | 1.338924 |
| PCTUC_944 | 2.302399 | 2.098599 | 1.513715 | −1.04266 | 2.621862 |
| PCTUC_945 | 1.999231 | 2.014684 | 3.082334 | 2.063655 | 1.362715 |
| PCTUC_946 | 2.545056 | 2.827518 | 2.61495 | 1.211746 | 2.104344 |
| PCTUC_947 | 2.561492 | 3.223751 | 2.778957 | 1.930789 | 1.553573 |
| PCTUC_948 | 1.706577 | −1.308394 | −1.237869 | 1.039971 | 3.865446 |
| PCTUC_949 | 1.43762 | 3.289446 | 1.772405 | 1.788377 | 2.09428 |
| PCTUC_950 | 13.208265 | 9.352516 | 4.609438 | 8.549457 | 1.956832 |
| PCTUC_951 | 2.494127 | 1.998511 | 1.590633 | −1.031617 | 2.656538 |
| PCTUC_952 | 2.82671 | 2.233259 | 3.037292 | 2.039842 | 2.084847 |
| PCTUC_953 | 2.853971 | 3.279671 | 4.436422 | 1.663468 | 3.558529 |
| PCTUC_954 | 3.898259 | 3.25054 | 3.100874 | 2.376224 | 2.463332 |
| PCTUC_955 | 2.017269 | 1.446693 | 1.930404 | 1.320767 | 2.193144 |
| PCTUC_956 | 2.800478 | 5.191406 | 2.169827 | 2.550036 | 1.613759 |
| PCTUC_957 | 2.047268 | 2.226898 | 1.30777 | 2.2121 | 2.037518 |
| PCTUC_958 | 2.344756 | 2.871189 | 3.006427 | 2.284117 | 4.198602 |
| PCTUC_959 | 1.986256 | 2.648532 | 2.317293 | 2.659039 | 1.70162 |
| PCTUC_960 | 2.235276 | 1.97325 | 1.955242 | 1.238362 | 2.183643 |
| PCTUC_961 | 1.63631 | 1.274917 | 2.890156 | −1.242321 | 3.175415 |
| PCTUC_962 | 2.321866 | 1.862551 | 1.916661 | 1.87765 | 2.2245 |
| PCTUC_963 | 1.999053 | 1.822242 | 1.93074 | 1.022611 | 2.052344 |
| PCTUC_964 | 2.92635 | 2.622254 | 2.912582 | 3.961787 | 1.85012 |
| PCTUC_965 | 2.240051 | 1.577813 | 2.167076 | 1.196908 | 2.714298 |
| PCTUC_966 | 8.739191 | 1.618101 | 17.573606 | 7.109097 | 1.762113 |
| PCTUC_967 | 3.445451 | 2.098926 | 3.399137 | 1.719636 | 2.686562 |
| PCTUC_968 | 2.356605 | 2.231912 | 1.267656 | 1.811389 | 3.422028 |
| PCTUC_969 | 2.303658 | 2.29328 | 1.62459 | 1.166594 | 1.631738 |
| PCTUC_970 | 3.712332 | 3.554731 | 3.460251 | 1.426326 | 2.987715 |
| PCTUC_971 | 2.520978 | 2.121438 | 1.94307 | 1.326363 | 1.768682 |
| PCTUC_972 | 2.542714 | 2.971309 | 2.511884 | 1.574862 | 2.593775 |
| PCTUC_973 | 2.079656 | 1.617495 | 1.915495 | 1.297526 | 2.815989 |
| PCTUC_974 | 1.637691 | 3.281691 | 4.147404 | 3.280086 | 1.723133 |
| PCTUC_975 | 1.908338 | 1.326548 | 1.354787 | 1.804381 | 3.117997 |
| PCTUC_976 | 2.122945 | 2.807116 | 2.32995 | 2.880146 | 1.539895 |
| PCTUC_977 | 2.142424 | 4.477849 | 3.614886 | 1.303536 | 1.630268 |
| PCTUC_978 | 1.844867 | 4.566318 | 3.164039 | 1.116617 | 1.187718 |
| PCTUC_979 | 3.689453 | 1.997519 | 1.491258 | 1.672252 | 2.057643 |
| PCTUC_980 | 1.886542 | 2.248851 | 2.074873 | 1.414794 | 2.233084 |
| PCTUC_981 | 2.08836 | 2.049679 | 2.05979 | 1.236637 | 2.006662 |
| PCTUC_982 | 9.422415 | 5.445676 | 4.121441 | 3.337268 | −1.077134 |
| PCTUC_983 | 2.169163 | 1.979837 | 3.120249 | 3.177388 | 1.344734 |
| PCTUC_984 | 2.545414 | 3.161671 | −1.048021 | −1.020995 | 1.377628 |
| PCTUC_985 | 3.494484 | 5.996723 | 4.444107 | 3.225024 | 2.333731 |
| PCTUC_986 | 6.475299 | 5.153673 | 5.127562 | 1.588725 | 3.348588 |
| PCTUC_987 | 2.460184 | 2.194276 | 1.690811 | 1.674193 | 2.135545 |
| PCTUC_988 | 2.052341 | 2.031957 | 3.182646 | 2.178561 | 1.434476 |
| PCTUC_989 | 2.641716 | 2.272612 | 1.178549 | 2.740248 | 2.787188 |
| PCTUC_990 | 2.228094 | 2.029221 | 1.743631 | 2.108763 | 1.605475 |
| PCTUC_991 | −1.120914 | 2.574555 | 1.406036 | −2.033588 | 2.358146 |
| PCTUC_992 | 2.587451 | 2.230571 | 2.801737 | 2.085155 | 1.888326 |
| PCTUC_993 | 2.389752 | 1.481784 | 1.738086 | 1.470533 | 3.590099 |
| PCTUC_994 | 3.214524 | 3.677742 | 4.622314 | 3.995251 | 2.352907 |
| PCTUC_995 | 1.299307 | 2.503965 | 1.912283 | −1.000929 | 1.964259 |
| PCTUC_996 | 3.145576 | 2.075071 | 1.719235 | 1.5831 | −1.106453 |
| PCTUC_997 | 3.614506 | 2.11737 | 2.371607 | 2.323291 | 1.895755 |
| PCTUC_998 | 1.503244 | 2.900391 | 2.956001 | 2.59196 | 1.536935 |
| PCTUC_999 | 1.54409 | 2.00904 | 2.189009 | 1.112385 | 6.224452 |
| PCTUC_1000 | 2.257364 | 1.945727 | 3.821304 | 2.174996 | 1.875551 |
| PCTUC_1001 | 1.935329 | 2.216833 | 1.58268 | 3.462853 | 2.968328 |
| PCTUC_1002 | 2.510861 | 1.434915 | 2.16613 | 1.911476 | 1.278224 |
| PCTUC_1003 | 2.83421 | 1.655505 | 1.6249 | 2.138236 | 6.283207 |
| PCTUC_1004 | 2.979737 | 2.171031 | 2.224337 | 1.850705 | 1.290176 |
| PCTUC_1005 | 1.557493 | 2.305755 | 2.095499 | 2.149415 | 1.390719 |
| PCTUC_1006 | 5.535388 | 7.73051 | 3.142701 | −1.084378 | 3.258003 |
| PCTUC_1007 | 2.615719 | 1.901241 | 1.692383 | 1.787937 | 2.608618 |
| PCTUC_1008 | 1.663619 | 1.794802 | 6.374212 | 1.840365 | 4.460235 |
| PCTUC_1009 | 2.892305 | 2.170208 | 1.440984 | 1.408635 | 2.93398 |
| PCTUC_1010 | 1.880008 | 1.988196 | 2.131428 | 2.353244 | 1.907687 |
| PCTUC_1011 | 2.377302 | 2.395559 | 2.353736 | 1.510876 | 2.469237 |
| PCTUC_1012 | 7.20619 | 3.67785 | 3.583454 | 2.960135 | 3.33169 |
| PCTUC_1013 | 2.295973 | 1.924709 | 2.110733 | 2.214748 | 1.67961 |
| PCTUC_1014 | 1.945588 | 6.071303 | 6.141302 | 4.545424 | 1.493324 |
| PCTUC_1015 | 2.437442 | 2.363077 | 1.907915 | 1.24577 | 2.015562 |
| PCTUC_1016 | 2.648614 | 2.691739 | 2.125413 | 1.510101 | 1.551306 |
| PCTUC_1017 | 2.08836 | 2.478742 | 2.411507 | 1.85197 | 2.521672 |
| PCTUC_1018 | 2.211551 | 2.414348 | 2.150821 | 1.263532 | 2.090107 |
| PCTUC_1019 | 2.243053 | 2.254891 | 2.0381 | 1.362609 | 2.175798 |
| PCTUC_1020 | 2.178661 | 2.363133 | 1.977522 | 1.234102 | 2.011053 |
| PCTUC_1021 | 3.163341 | 2.58837 | 2.621589 | 1.408393 | 3.120556 |
| PCTUC_1022 | 2.174315 | 2.401368 | 2.06502 | 1.434312 | 1.691736 |
| PCTUC_1023 | 2.03722 | 1.811963 | 2.094636 | 1.388881 | 2.020649 |
| PCTUC_1024 | 2.445513 | 2.453608 | 1.804029 | 3.237316 | 1.742311 |
| PCTUC_1025 | 2.117916 | 2.15395 | 2.049663 | 1.506818 | 1.973658 |
| PCTUC_1026 | 2.10133 | 1.767012 | 2.766461 | 1.130868 | 2.016076 |
| PCTUC_1027 | 2.237257 | 2.367525 | 2.2373 | 1.669054 | 1.671289 |
| PCTUC_1028 | 1.694805 | 3.393244 | 2.780445 | 1.023844 | 1.428 |
| PCTUC_1029 | 3.43763 | 2.470928 | 2.477139 | 1.661261 | 1.722777 |
| PCTUC_1030 | 1.676745 | 3.116692 | 1.956181 | 2.168289 | 1.894927 |
| PCTUC_1031 | 2.563475 | 2.375423 | 2.750607 | 1.337144 | 2.270017 |
| PCTUC_1032 | 1.701297 | 7.355005 | 8.588897 | 6.225047 | 1.699016 |
| PCTUC_1033 | 2.254854 | 2.130038 | 1.321677 | 1.750454 | 2.423863 |
| PCTUC_1034 | 2.101815 | 2.041247 | 1.677848 | 1.32662 | 2.254946 |
| PCTUC_1035 | 2.007621 | 2.009369 | 2.074745 | 1.271912 | 2.072435 |
| PCTUC_1036 | 2.671005 | 2.959068 | 3.898445 | 2.528466 | 2.557439 |
| PCTUC_1037 | 2.553691 | 1.57382 | 1.76822 | 2.366851 | 1.942184 |
| PCTUC_1038 | 2.632271 | 2.32554 | 1.337809 | 2.459163 | 3.139472 |
| PCTUC_1039 | 2.077623 | 1.529966 | 1.836295 | 1.394481 | 1.958322 |
| PCTUC_1040 | 2.194537 | 2.399347 | 2.303395 | 1.89259 | 2.729439 |
| PCTUC_1041 | 2.330321 | 2.353049 | 2.368518 | 1.439722 | 1.806904 |
| PCTUC_1042 | 1.512719 | 1.910023 | 2.468123 | 1.859708 | 2.13613 |
| PCTUC_1043 | 2.258492 | 3.003565 | 2.174273 | 1.297437 | 2.415284 |
| PCTUC_1044 | 3.830532 | 2.841184 | 3.037506 | 1.615478 | 3.303318 |
| PCTUC_1045 | 2.521084 | 2.768955 | 2.359327 | 1.532786 | 2.363462 |
| PCTUC_1046 | 2.691287 | 2.029598 | 2.164129 | 1.569587 | 2.17121 |
| PCTUC_1047 | 4.148441 | 3.724395 | 2.311642 | 2.541887 | 2.194607 |
| PCTUC_1048 | 3.402202 | 3.200241 | 2.513871 | 2.593382 | 1.939163 |
| PCTUC_1049 | 2.740732 | 2.697594 | 2.084831 | 2.384646 | 2.168709 |
| PCTUC_1050 | 1.640787 | 2.482057 | 1.476933 | 1.563183 | 2.135159 |
| PCTUC_1051 | 1.358934 | 2.087856 | 1.620875 | 1.902402 | 1.913099 |
| PCTUC_1052 | 2.165557 | 1.650278 | 1.46462 | 1.314437 | 1.562692 |
| PCTUC_1053 | 2.334652 | 3.100399 | 1.809538 | 1.788479 | 3.325128 |
| PCTUC_1054 | 2.429376 | 1.579998 | 1.683261 | 1.886491 | 1.238793 |
| PCTUC_1055 | 1.001255 | 4.122614 | 1.903675 | 1.909667 | 2.93935 |
| PCTUC_1056 | 5.635899 | 4.017169 | 2.059601 | 2.393082 | 1.742979 |
| PCTUC_1057 | 3.696463 | 3.913398 | 2.197404 | 2.421372 | 1.805608 |
| PCTUC_1058 | 2.074971 | 2.023162 | 1.930327 | 1.872757 | 1.92556 |
| PCTUC_1059 | 3.01785 | 2.41626 | 2.067343 | 1.854001 | 1.630117 |
| PCTUC_1060 | 3.432813 | 3.74384 | 2.526108 | 2.254666 | 1.940598 |
| PCTUC_1061 | 3.597329 | 3.734005 | 2.229716 | 2.217949 | 1.926729 |
| PCTUC_1062 | 2.533764 | 1.934094 | 2.167086 | 2.696558 | 1.715214 |
| PCTUC_1063 | 2.157444 | 2.482796 | 1.867876 | 1.765957 | 1.589517 |
| PCTUC_1064 | 4.09897 | 3.738977 | 2.442533 | 2.412839 | 2.164216 |
| PCTUC_1065 | 2.054724 | 2.228052 | 2.512652 | 1.919982 | 2.701186 |
| PCTUC_1066 | 2.084735 | 2.24061 | 1.429457 | 1.82487 | 2.75413 |
| PCTUC_1067 | 2.933006 | 4.749996 | 2.385475 | 1.909325 | 4.58545 |
| PCTUC_1068 | 2.701608 | 1.184968 | 1.307782 | 2.119545 | 3.026683 |
| PCTUC_1069 | 2.625726 | 4.286357 | 2.167391 | 2.290825 | 4.321199 |
| PCTUC_1070 | 1.584965 | 1.882021 | 1.744875 | 2.283847 | 1.837694 |
| PCTUC_1071 | 1.470987 | 2.153697 | 1.495836 | 1.419932 | 5.155255 |
| PCTUC_1072 | 2.802821 | 2.533034 | 1.67031 | 2.088873 | 1.771321 |
| PCTUC_1073 | 2.478014 | 2.234136 | 1.961086 | 1.38199 | 5.264887 |
| PCTUC_1074 | 2.892866 | 2.33099 | 1.988019 | 2.946748 | 1.108592 |
| PCTUC_1075 | 4.04627 | 4.70859 | 2.551507 | 1.56122 | 1.826874 |
| PCTUC_1076 | 3.606797 | 4.151217 | 1.930236 | 2.696807 | 5.593647 |
| PCTUC_1077 | 1.616496 | 3.197529 | 3.108619 | 1.130574 | 1.346149 |
| PCTUC_1078 | 1.422069 | 4.019051 | 1.909229 | 1.279646 | 1.15715 |
| PCTUC_1079 | 2.122901 | 1.275714 | 1.809766 | 3.093876 | 3.302016 |
| PCTUC_1080 | 1.828537 | 1.957328 | 1.229454 | 1.199278 | 1.232905 |
| PCTUC_1081 | 6.836148 | 5.102329 | 2.717062 | 2.208524 | 2.300102 |
| PCTUC_1082 | 6.903161 | 1.482253 | 2.091234 | 6.780239 | 1.029036 |
| PCTUC_1083 | 2.452948 | 1.82755 | 2.15254 | 2.260958 | 1.523636 |
| PCTUC_1084 | 2.247821 | 2.066517 | 2.982403 | 1.608464 | 2.04356 |
| PCTUC_1085 | 1.874127 | 1.955559 | 1.498886 | 1.842026 | 1.538427 |
| PCTUC_1086 | 2.847633 | 6.075811 | 4.381285 | 1.511456 | 1.868587 |
| PCTUC_1087 | 1.3664 | 2.123451 | 2.9151 | 2.105061 | 2.410319 |
| PCTUC_1088 | 1.936453 | 1.911005 | 2.479018 | 1.812969 | 2.036546 |
| PCTUC_1089 | 1.24914 | 1.909665 | 1.100831 | −1.024006 | 1.882236 |
| PCTUC_1090 | 2.427823 | 3.291917 | 2.632262 | −1.157801 | 2.557583 |
| PCTUC_1091 | −1.135505 | −1.247456 | −1.045071 | −1.085618 | 2.864153 |
| PCTUC_1092 | 3.410679 | 6.492293 | 1.777087 | 1.695987 | 2.327668 |
| PCTUC_1093 | 3.755767 | 4.141311 | 4.201713 | 2.539634 | 3.961076 |
| PCTUC_1094 | 2.617909 | 2.304399 | 2.340273 | 2.152541 | 2.739291 |
| PCTUC_1095 | 3.191518 | 2.927253 | 2.048578 | 1.963189 | 1.810486 |
| PCTUC_1096 | 2.476109 | 2.670372 | 1.640251 | 1.433016 | 1.183916 |
| PCTUC_1097 | 2.792058 | 1.011758 | 2.032809 | 4.583232 | 2.712476 |
| PCTUC_1098 | 3.151127 | 3.072883 | 3.069124 | 2.292287 | 3.349233 |
| PCTUC_1099 | 1.913735 | 1.955109 | 2.239843 | 2.06643 | 1.812519 |
| PCTUC_1100 | 2.463933 | 2.147176 | 3.594009 | 3.065532 | 4.90844 |
| PCTUC_1101 | 2.644637 | 2.395418 | 2.492429 | 1.721552 | 2.093062 |
| PCTUC_1102 | 1.794169 | 4.295766 | 1.950269 | 1.521305 | 3.031758 |
| PCTUC_1103 | 3.468701 | 3.695937 | 2.574288 | 3.952629 | 14.716324 |
| PCTUC_1104 | 1.125964 | 2.803037 | 2.456732 | 2.102422 | −1.074769 |
| PCTUC_1105 | 2.568763 | 2.527151 | 2.689841 | 2.754335 | 1.771922 |
| PCTUC_1106 | 2.643478 | 2.604252 | 3.498866 | 3.627512 | 1.705972 |
| PCTUC_1107 | 1.526503 | 3.075097 | 1.460604 | 1.517412 | 2.6556 |
| PCTUC_1108 | 2.463843 | 2.560478 | 3.215582 | 1.354654 | 1.810031 |
| PCTUC_1109 | 3.588415 | 2.108878 | 2.986275 | 1.881867 | 2.134955 |
| PCTUC_1110 | 2.204521 | 2.448262 | 2.352178 | 2.286165 | 1.417835 |
| PCTUC_1111 | 2.069705 | 2.8492 | 1.984487 | 2.394027 | 3.019645 |
| PCTUC_1112 | 5.447097 | 2.774286 | 1.580806 | 1.491514 | 1.893947 |
| PCTUC_1113 | 7.077715 | 9.720737 | 2.134717 | 4.605519 | 9.415028 |
| PCTUC_1114 | 1.609405 | 3.273106 | 1.546363 | 1.695939 | 2.102199 |
| PCTUC_1115 | 2.537809 | 2.632147 | 1.810424 | 3.062999 | 2.56556 |
| PCTUC_1116 | 1.964747 | 2.737338 | 1.587556 | 1.63718 | 2.788908 |
| PCTUC_1117 | 1.654424 | 3.967134 | −1.022176 | 1.599265 | 1.611094 |
| PCTUC_1118 | 1.423818 | 1.82765 | 1.933905 | 1.546609 | 2.088507 |
| PCTUC_1119 | 1.956617 | 1.911459 | 1.960848 | 1.916424 | 1.27242 |
| PCTUC_1120 | 2.248806 | 2.269157 | 1.875802 | 1.964867 | 1.680379 |

| | Colon | Colon | Colon | Colon | Colon |
|---|---|---|---|---|---|
| Internal Id | Tumor 6 | Tumor 7 | Tumor 8 | Tumor 9 | Tumor 10 |
| PCTUC_1 | 2.489082 | 1.179339 | 1.210582 | −1.500949 | 1.525775 |
| PCTUC_2 | 4.119026 | 2.455277 | 2.637006 | 1.209973 | −1.000567 |
| PCTUC_3 | 1.005496 | 5.875144 | 6.30145 | −1.159219 | 2.552166 |
| PCTUC_4 | 1.199631 | 3.034428 | 2.040424 | 2.191431 | 2.560127 |
| PCTUC_5 | 1.860806 | 2.206577 | 5.10363 | 6.760265 | 4.802891 |
| PCTUC_6 | 1.212183 | 1.667211 | 3.338447 | 1.982268 | 1.572041 |
| PCTUC_7 | 2.602364 | 1.40409 | 3.219049 | 1.47228 | 1.677557 |
| PCTUC_8 | 4.990086 | 1.091259 | 5.882385 | 3.828326 | 1.331393 |
| PCTUC_9 | −1.36474 | 1.922685 | 2.5084 | 1.303766 | 2.178063 |
| PCTUC_10 | 1.969926 | 2.081224 | 2.411553 | 1.657971 | −1.743247 |
| PCTUC_11 | 2.568045 | 1.596274 | 4.858005 | 2.774633 | 1.975318 |
| PCTUC_12 | 3.78894 | 2.013017 | 2.542768 | 2.626356 | 1.422498 |
| PCTUC_13 | 1.86401 | 2.481613 | 2.293715 | 1.852841 | 1.855033 |
| PCTUC_14 | 1.693567 | 2.454003 | 1.683912 | 1.03871 | 2.257919 |
| PCTUC_15 | 1.914858 | 2.013299 | 5.353806 | 4.08829 | 2.007689 |
| PCTUC_16 | 1.732865 | 2.3366 | 4.066249 | 3.479868 | 3.223681 |
| PCTUC_17 | 1.254072 | −1.096253 | −1.756643 | 1.935014 | −3.121983 |
| PCTUC_18 | 1.683823 | 2.186993 | 2.96542 | 2.487542 | 3.251436 |
| PCTUC_19 | 1.508808 | 1.818975 | 2.720885 | 3.012143 | 3.537117 |
| PCTUC_20 | 1.709264 | 2.094551 | 2.094095 | 1.963154 | 2.195627 |
| PCTUC_21 | 1.437381 | 2.023834 | 2.282534 | 1.277144 | 1.666151 |
| PCTUC_22 | 1.707798 | 2.027604 | 2.128659 | 2.171994 | 2.981197 |
| PCTUC_23 | 1.597093 | 2.13367 | 2.338216 | 2.116655 | 2.618075 |
| PCTUC_24 | −1.119074 | 1.240807 | 1.92722 | 2.278076 | 2.961248 |
| PCTUC_25 | 1.648136 | 2.679808 | 2.685308 | 2.532363 | 2.311755 |
| PCTUC_27 | 2.039945 | 2.314785 | 2.445415 | 1.99636 | 2.038934 |
| PCTUC_28 | 1.678706 | 2.822846 | 1.88328 | 1.953373 | 2.189538 |
| PCTUC_29 | 1.368914 | 2.383155 | 1.000889 | 2.234657 | 1.527855 |
| PCTUC_30 | 1.760434 | 2.268146 | 2.543274 | 1.988293 | 2.669211 |
| PCTUC_31 | 1.334197 | 2.871417 | 2.122144 | 1.3468 | 1.960979 |
| PCTUC_32 | 1.218089 | 1.774198 | 2.142013 | 2.850726 | 2.695594 |
| PCTUC_33 | 1.389436 | 2.702812 | 2.145138 | 1.920181 | 2.031137 |
| PCTUC_34 | 2.308969 | 1.788974 | 1.978217 | 2.045808 | 1.735026 |
| PCTUC_35 | 1.765146 | 2.861895 | 3.731195 | 2.581271 | 3.074587 |
| PCTUC_36 | 1.833468 | 2.432657 | 2.726498 | 2.961284 | 2.017774 |
| PCTUC_37 | 1.597116 | 1.618725 | 2.926616 | 2.415369 | 2.998529 |
| PCTUC_38 | 1.568038 | 1.956689 | 1.717832 | 1.848987 | 3.147673 |
| PCTUC_39 | 1.901959 | 3.708238 | 1.892787 | 3.094937 | 2.192067 |
| PCTUC_40 | 1.399132 | 2.258712 | 2.419852 | 1.798392 | 1.924235 |
| PCTUC_41 | 1.144015 | 1.825707 | 2.340699 | 1.925134 | 1.971642 |
| PCTUC_42 | 1.426665 | 2.701805 | 2.495222 | 3.045982 | 3.19735 |
| PCTUC_43 | 4.018248 | −1.717588 | 3.282683 | 1.355019 | −2.227438 |
| PCTUC_44 | 1.901663 | 2.288847 | 3.732934 | 1.771478 | 2.074904 |
| PCTUC_45 | 1.920817 | 2.960815 | 3.469161 | 2.769985 | 3.980089 |
| PCTUC_46 | 1.389416 | 4.811975 | 6.741828 | 1.411192 | 4.160511 |
| PCTUC_47 | 2.28666 | −1.026749 | 1.882731 | −1.020302 | −1.161207 |
| PCTUC_48 | 2.37839 | 2.51831 | 4.070007 | 2.886431 | 2.084877 |
| PCTUC_49 | 1.263168 | 3.046843 | 3.630741 | 3.958366 | 4.64426 |
| PCTUC_50 | 1.410489 | 2.236377 | 1.987109 | 2.029714 | 2.282976 |
| PCTUC_51 | 1.60263 | 2.121905 | 1.692895 | 1.738349 | 2.351656 |
| PCTUC_52 | 2.385026 | 1.081419 | 2.46315 | 1.161641 | −1.600941 |
| PCTUC_53 | 1.587455 | 2.536895 | 3.264168 | 3.314468 | 3.182655 |
| PCTUC_54 | 1.107599 | 2.914414 | 2.088041 | 2.297055 | 2.521916 |
| PCTUC_55 | 1.428883 | 2.366578 | 2.212243 | 2.574092 | 3.033405 |
| PCTUC_56 | 1.669315 | 2.29392 | 2.890783 | 3.26451 | 3.500622 |
| PCTUC_57 | 1.410287 | 2.059224 | 2.085696 | 1.64198 | 2.190387 |
| PCTUC_58 | 1.394989 | 2.557589 | 2.430643 | 2.140668 | 2.649637 |
| PCTUC_59 | 1.799848 | 1.85432 | 2.296163 | 1.586154 | 1.753843 |
| PCTUC_60 | 1.712394 | 2.212893 | 2.592989 | 1.856218 | 2.779451 |
| PCTUC_61 | 1.727563 | 1.623219 | 2.784914 | 2.158502 | 2.995003 |
| PCTUC_62 | 1.412706 | 2.11299 | 1.986623 | 1.438089 | 2.129747 |
| PCTUC_63 | 1.6105 | 4.15876 | 2.426561 | 2.206344 | 3.127447 |
| PCTUC_64 | 1.236849 | 2.340298 | 2.036072 | 2.087404 | 2.694909 |
| PCTUC_65 | 1.235732 | 2.317672 | 2.306382 | 2.003266 | 2.126323 |
| PCTUC_66 | 1.619317 | 2.178478 | 2.276473 | 2.05338 | 2.074758 |
| PCTUC_67 | 1.753909 | 1.97785 | 1.79724 | 1.433013 | 2.074351 |
| PCTUC_68 | 1.358542 | 2.104213 | 2.034427 | 1.717962 | 1.406569 |
| PCTUC_69 | 1.639055 | 1.641071 | 2.025247 | 1.196433 | 1.558159 |
| PCTUC_70 | 1.921972 | 2.268832 | 2.628053 | 1.66275 | 2.378746 |
| PCTUC_71 | 2.267135 | 1.564448 | 1.615601 | 2.039741 | 1.579345 |
| PCTUC_72 | 1.760416 | 3.557688 | 2.643089 | 2.44463 | 3.665364 |
| PCTUC_73 | 1.683902 | 1.809353 | 2.241871 | 2.040006 | 2.312258 |
| PCTUC_74 | 1.421482 | 1.944983 | 2.06476 | 1.296222 | 1.954839 |
| PCTUC_75 | 1.437059 | 2.601595 | 2.122126 | 2.107793 | 1.98714 |
| PCTUC_76 | 1.942441 | 1.555217 | 1.902045 | −1.09762 | −1.010611 |
| PCTUC_77 | 1.195854 | 2.903624 | 2.60441 | 2.066324 | 2.714115 |
| PCTUC_78 | 1.181195 | 1.810331 | 2.232351 | 1.67842 | 2.220953 |
| PCTUC_79 | 1.621712 | 2.469737 | 2.889681 | 2.831694 | 3.861511 |
| PCTUC_80 | 1.369115 | 1.454227 | 1.95301 | 1.843292 | 2.085274 |
| PCTUC_81 | 1.760196 | 2.054171 | 1.836205 | 1.987947 | 3.053376 |
| PCTUC_82 | 2.259899 | 4.030933 | 5.108284 | 1.813017 | 1.846668 |
| PCTUC_83 | 3.053387 | 2.580104 | 7.283586 | 3.504228 | 3.625079 |
| PCTUC_84 | 2.01469 | 3.056976 | 8.148343 | 3.72328 | 6.142403 |
| PCTUC_85 | 1.307712 | 1.589812 | 1.99927 | 1.847969 | 2.260472 |
| PCTUC_86 | 2.220748 | 3.581237 | 5.052755 | 5.616655 | 5.332936 |
| PCTUC_87 | 1.699534 | 2.314521 | 1.886742 | 1.394717 | 1.442726 |
| PCTUC_88 | 1.929106 | 2.036797 | 3.083732 | 3.142027 | 3.882488 |
| PCTUC_89 | 1.316076 | 1.530518 | 2.001615 | 1.930774 | 1.798015 |
| PCTUC_90 | 1.857735 | 2.417712 | 2.532709 | 1.813916 | 2.823546 |
| PCTUC_91 | 1.63355 | 3.832869 | 2.333097 | 1.372882 | 2.447965 |
| PCTUC_92 | 1.666357 | 2.701302 | 1.772067 | 1.774099 | 2.143625 |
| PCTUC_93 | 2.607343 | 4.430416 | 5.798988 | 5.255655 | 7.660719 |
| PCTUC_94 | 1.715865 | 2.232659 | 2.694269 | 2.328191 | 3.154522 |
| PCTUC_95 | 1.843929 | 1.533536 | 2.207211 | 1.42266 | 1.867618 |
| PCTUC_96 | 1.826181 | 1.444591 | 1.594736 | 1.656573 | 2.302421 |
| PCTUC_97 | 1.151094 | 1.998184 | 2.523026 | 2.472415 | 3.031885 |
| PCTUC_98 | 1.489856 | 3.310011 | 3.274649 | 2.506988 | 3.68643 |
| PCTUC_99 | 2.06415 | 2.539989 | 3.015937 | 2.478161 | 3.691117 |
| PCTUC_100 | 1.589476 | 2.987672 | 2.551001 | 2.194593 | 2.946532 |
| PCTUC_101 | 1.367315 | 1.511417 | 1.960072 | 1.568574 | 1.827056 |
| PCTUC_102 | 2.120865 | 2.018083 | 1.663197 | −1.251624 | 1.116722 |
| PCTUC_103 | 1.657802 | 1.825109 | 2.626874 | 2.153862 | 2.633694 |
| PCTUC_104 | 1.727754 | 1.908005 | 2.199311 | 1.763109 | 2.300518 |
| PCTUC_105 | 1.774548 | 2.498841 | 2.219475 | 2.53344 | 3.003811 |
| PCTUC_106 | 1.986182 | 2.1625 | 1.853343 | 1.876295 | 2.219061 |
| PCTUC_107 | 1.428675 | 3.43222 | 3.999756 | 2.34375 | 1.125152 |
| PCTUC_108 | 2.390612 | 2.187789 | 2.57185 | −2.25182 | −1.321648 |
| PCTUC_109 | 2.270507 | 4.797082 | 4.657402 | 4.699218 | 5.555741 |
| PCTUC_110 | 1.475036 | 1.720918 | 1.949022 | 1.091809 | 2.113063 |
| PCTUC_111 | 1.356621 | 2.66051 | 2.240773 | 1.417537 | 2.266325 |
| PCTUC_112 | 1.436257 | 2.905006 | 3.577459 | 3.043684 | 3.659114 |
| PCTUC_113 | 1.979509 | 2.612262 | 4.243793 | 3.004574 | 5.308458 |
| PCTUC_114 | 2.578598 | 4.425914 | 5.114237 | 5.027148 | 7.201783 |
| PCTUC_115 | 2.113645 | 3.79364 | 4.499948 | 3.998406 | 5.093233 |
| PCTUC_116 | 2.177961 | 2.663367 | 3.985358 | 3.658729 | 4.065497 |
| PCTUC_117 | 2.324831 | 3.71894 | 5.194387 | 4.871262 | 8.52777 |
| PCTUC_118 | 1.073007 | 2.146897 | 2.531411 | 2.827695 | 3.864724 |
| PCTUC_119 | 1.417364 | 3.733404 | 2.569529 | 1.923712 | 2.616817 |
| PCTUC_120 | 2.043426 | 3.579566 | 3.415488 | 3.988481 | 5.692827 |
| PCTUC_121 | 2.193191 | 3.784323 | 3.251114 | 2.983277 | 4.42307 |
| PCTUC_122 | 1.833187 | 2.382438 | 2.799391 | 2.247619 | 3.287899 |
| PCTUC_123 | 1.773008 | 2.15826 | 2.126261 | 1.823674 | 2.55418 |
| PCTUC_124 | 2.436061 | 3.979022 | 4.108718 | 3.802742 | 5.029344 |
| PCTUC_125 | 2.573088 | 3.251187 | 3.020403 | 2.911322 | 4.168266 |
| PCTUC_126 | 2.581049 | 3.680543 | 4.021809 | 3.870054 | 4.986007 |
| PCTUC_127 | 2.522426 | 4.309034 | 4.886045 | 4.733597 | 5.523011 |
| PCTUC_128 | 2.152378 | 4.22779 | 4.702429 | 4.055894 | 6.302035 |
| PCTUC_129 | 1.707048 | 2.728328 | 4.065711 | 2.544175 | 4.100242 |
| PCTUC_130 | 1.266083 | 2.077873 | 1.683113 | 1.734082 | 2.06349 |
| PCTUC_131 | 1.270988 | 2.04825 | 2.313275 | 2.000083 | 2.74953 |
| PCTUC_132 | 1.579236 | 1.830217 | 2.785681 | 2.457472 | 3.307127 |
| RCTUC_133 | 1.731929 | 3.150585 | 4.064429 | 2.606395 | 3.244058 |
| PCTUC_134 | 1.612822 | 4.448137 | 4.003712 | 3.285781 | 3.945924 |
| PCTUC_135 | 1.846059 | 1.863919 | 2.309483 | 1.794108 | 2.744771 |
| PCTUC_136 | 1.355217 | 1.798358 | 2.22741 | 1.796116 | 2.565216 |
| PCTUC_137 | 1.35991 | 2.570772 | 2.806133 | 2.604188 | 3.888691 |
| PCTUC_138 | 1.524161 | 1.745744 | 2.406214 | 2.042087 | 2.619121 |
| PCTUC_139 | 1.143266 | 2.066499 | 1.963953 | 1.841994 | 2.064502 |
| PCTUC_140 | 2.414967 | 4.98026 | 4.444968 | 4.510729 | 4.851974 |
| PCTUC_141 | 1.889636 | 2.541389 | 3.602278 | 2.748523 | 4.301198 |
| PCTUC_142 | 2.397714 | 4.855232 | 6.581445 | 5.864189 | 5.030571 |
| PCTUC_143 | 1.403801 | 2.190016 | 2.591157 | 2.568045 | 3.211911 |
| PCTUC_144 | 1.647328 | 2.414353 | 2.496427 | 2.541264 | 3.560737 |
| PCTUC_145 | 1.660398 | 2.395132 | 2.796336 | 2.654901 | 3.40539 |
| PCTUC_146 | 1.584713 | 2.94323 | 2.317092 | 2.006493 | 2.575637 |
| PCTUC_147 | 2.001094 | 2.210781 | 2.228616 | 2.339426 | |
| PCTUC_148 | 1.509576 | 2.475563 | 3.592372 | 3.070454 | 4.243995 |
| PCTUC_149 | 1.758313 | 2.260378 | 2.22741 | 1.93171 | 2.465638 |
| PCTUC_150 | 2.146984 | 3.071743 | 2.980247 | 2.838894 | 3.951463 |
| PCTUC_151 | 1.118945 | 1.690904 | 1.656675 | 2.072012 | 2.469634 |
| PCTUC_152 | 1.834308 | 2.092884 | 1.902702 | 1.615941 | 2.529564 |
| PCTUC_153 | 1.342434 | 2.327278 | 1.829888 | 1.51327 | 2.055782 |
| PCTUC_154 | 2.087219 | 5.444258 | 4.698549 | 3.542736 | 4.80305 |
| PCTUC_155 | 1.900503 | 3.86909 | 2.834414 | 2.736624 | 3.900374 |
| PCTUC_156 | 1.355351 | 3.034428 | 2.511339 | 2.120448 | 3.005841 |
| PCTUC_157 | 1.448459 | 2.420711 | 2.545386 | 1.995685 | 2.728806 |
| PCTUC_158 | 1.941758 | 2.007342 | 2.254047 | 1.631933 | 2.410079 |
| PCTUC_159 | 1.578095 | 3.848518 | 3.110776 | 2.391282 | 3.468199 |
| PCTUC_160 | 1.71481 | 3.247859 | 2.328171 | 2.225173 | 2.633327 |
| PCTUC_161 | 1.64334 | 1.970826 | 1.135816 | 1.408153 | 1.169709 |
| PCTUC_162 | 1.516161 | 3.428723 | 2.54344 | 1.760029 | 2.468676 |
| PCTUC_163 | 1.488808 | 3.324039 | 3.002135 | 2.720615 | 4.085257 |
| PCTUC_164 | 1.778077 | 3.709771 | 3.123746 | 3.284263 | 4.40286 |
| PCTUC_165 | 1.981667 | 3.475828 | 3.158709 | 3.283108 | 4.339454 |
| PCTUC_166 | 1.569606 | 2.37525 | 2.220013 | 1.636322 | 2.418371 |
| PCTUC_167 | 1.912417 | 3.642718 | 3.581518 | 4.185241 | 3.87418 |
| PCTUC_168 | 1.634055 | 2.771515 | 2.105632 | 1.719537 | 1.637775 |
| PCTUC_169 | 1.930187 | 3.72207 | 3.529785 | 2.909162 | 3.166899 |
| PCTUC_170 | 1.781 | 3.341992 | 3.305236 | 2.792567 | 3.879703 |
| PCTUC_171 | 2.919611 | 4.642657 | 4.902596 | 4.809088 | 5.596507 |
| PCTUC_172 | 1.550726 | 2.163172 | 2.490952 | 2.218841 | 3.090771 |
| PCTUC_173 | 2.903394 | 4.465715 | 5.46153 | 5.120931 | 6.050416 |
| PCTUC_174 | 1.861225 | 4.508595 | 3.761544 | 3.31325 | 4.360519 |
| PCTUC_175 | 1.755859 | 4.167829 | 2.880966 | 2.685777 | 3.379845 |
| PCTUC_176 | 2.262967 | 3.221856 | 3.569772 | 3.500499 | 4.628857 |
| PCTUC_177 | 1.524353 | 1.523746 | 2.458048 | 1.864571 | 2.685582 |
| PCTUC_178 | 1.847285 | 4.919324 | 4.203074 | 3.863744 | 4.174652 |
| PCTUC_179 | 1.747305 | 2.065585 | 2.24778 | 1.608568 | 2.147894 |
| PCTUC_180 | 1.946993 | 4.605177 | 4.671301 | 4.640214 | 5.030571 |
| PCTUC_181 | 1.425805 | 2.630357 | 1.739557 | 1.460964 | 2.22836 |
| PCTUC_182 | 1.996502 | 3.521755 | 2.171139 | 1.867099 | 2.465678 |
| PCTUC_183 | 2.458078 | 4.124454 | 2.703356 | 2.967947 | 3.801535 |
| PCTUC_184 | 2.076441 | 4.521826 | 5.001291 | 4.169762 | 4.55684 |
| PCTUC_185 | 2.14845 | 3.046543 | 3.044092 | 3.03148 | 3.943398 |
| PCTUC_186 | 1.769513 | 2.771634 | 2.852953 | 2.28604 | 2.764569 |
| PCTUC_187 | 1.613911 | 2.586738 | 2.64335 | 2.376528 | 3.03701 |
| PCTUC_188 | 2.045036 | 1.946169 | 2.901283 | 2.062389 | 1.39598 |
| PCTUC_189 | 1.169676 | 3.114371 | 2.026224 | 2.357244 | 2.775983 |
| PCTUC_190 | 1.856854 | 2.230163 | 3.423967 | 2.430517 | 2.049917 |
| PCTUC_191 | 1.381624 | 2.178181 | 1.989367 | 1.190545 | 2.491852 |
| PCTUC_192 | 1.482075 | 5.03285 | 2.084232 | 3.26451 | 4.011952 |
| PCTUC_193 | 1.29112 | 2.100079 | 2.480937 | 18.116383 | 2.875305 |
| PCTUC_194 | 2.001654 | 1.817391 | 2.171206 | 1.196635 | 2.300121 |
| PCTUC_195 | 1.900214 | 1.651488 | 1.142722 | 1.179752 | 1.38506 |
| PCTUC_196 | 1.73353 | 2.588496 | 3.12993 | 2.885138 | 3.500921 |
| PCTUC_197 | 2.348229 | 4.14646 | 4.193355 | 4.024918 | 5.287393 |
| PCTUC_198 | 1.261323 | 2.727162 | 2.404391 | 1.558354 | 2.043277 |
| PCTUC_199 | 1.487119 | 3.480046 | 2.848711 | 2.610347 | 3.40059 |
| PCTUC_200 | 1.388631 | 3.663344 | 3.536279 | 2.864961 | 3.865406 |
| PCTUC_201 | 1.994174 | 3.598878 | 3.87792 | 2.983387 | 4.888649 |
| PCTUC_202 | 2.062144 | 2.676319 | 2.53176 | 2.045086 | 3.460951 |
| PCTUC_203 | 1.880652 | 2.334102 | 2.838404 | 2.443658 | 3.758187 |
| PCTUC_204 | 1.656442 | 3.938874 | 5.426718 | 2.76839 | 4.144833 |
| PCTUC_205 | 1.670652 | 4.146744 | 4.298879 | 3.8508 | 5.717604 |
| PCTUC_206 | 1.62402 | 1.605383 | 1.612099 | 1.599941 | 2.471186 |
| PCTUC_207 | 1.797917 | 2.291486 | 3.536181 | 2.614953 | 4.12153 |
| PCTUC_208 | 1.490423 | 3.274915 | 3.02393 | 3.642722 | 3.909081 |
| PCTUC_209 | 1.66403 | 2.464782 | 2.728186 | 2.398898 | 3.647652 |
| PCTUC_210 | 1.723869 | 2.429967 | 2.551201 | 1.83207 | 2.613226 |
| PCTUC_211 | 3.216175 | 3.178193 | 3.426056 | 3.472931 | |
| PCTUC_212 | 2.177626 | 2.152791 | 2.324348 | 1.772685 | 2.773665 |
| PCTUC_213 | 1.631742 | 2.49734 | 2.631736 | 2.803728 | 3.287899 |
| PCTUC_214 | 2.201351 | 1.695774 | 1.932895 | 1.341692 | 2.163093 |
| PCTUC_215 | 1.464003 | 1.928169 | 2.393773 | 2.346943 | 2.913078 |
| PCTUC_216 | 1.803161 | 3.202755 | 3.098863 | 2.928031 | 4.003825 |
| PCTUC_217 | 1.096922 | 3.429597 | 1.901818 | 2.632384 | 2.647131 |
| PCTUC_218 | 1.901643 | 3.28671 | 2.752961 | 1.685245 | 2.549436 |
| PCTUC_219 | 1.47931 | 1.774027 | 2.026216 | 1.411155 | 1.786487 |
| PCTUC_220 | 2.250299 | 3.696237 | 3.884892 | 4.250008 | 5.088533 |
| PCTUC_221 | 1.8683 | 2.429364 | 2.863629 | 2.223653 | 3.416208 |
| PCTUC_222 | 2.575146 | 1.528597 | 1.305798 | 1.858591 | 1.029718 |
| PCTUC_223 | 2.1189 | 1.757274 | 2.368792 | 1.870888 | 2.201073 |
| PCTUC_224 | 1.143885 | 2.746074 | 1.721361 | 1.142136 | 3.933807 |
| PCTUC_225 | 3.947801 | 9.441274 | 14.251806 | 4.210367 | 6.532535 |
| PCTUC_226 | 2.55933 | 4.571705 | 3.583985 | 1.245965 | 2.777815 |
| PCTUC_227 | 2.978041 | 1.250008 | 2.425125 | 1.503769 | 1.170118 |
| PCTUC_228 | 1.813294 | 4.047213 | 2.051134 | 1.956453 | 1.732637 |
| PCTUC_229 | 7.329924 | 1.756996 | 6.414836 | 1.554824 | 2.703673 |
| PCTUC_230 | 2.291451 | 2.00425 | 3.101055 | 2.16244 | 2.591086 |
| PCTUC_231 | 1.650768 | 2.27758 | 2.859699 | 2.394677 | 3.114586 |
| PCTUC_232 | 1.851298 | 1.967491 | 2.211849 | 1.470639 | 1.909648 |
| PCTUC_233 | 3.503407 | 1.214912 | 2.087436 | 1.201315 | 1.306118 |
| PCTUC_234 | 1.744023 | 2.810245 | 2.624959 | 1.974127 | 2.182724 |
| PCTUC_235 | 1.967334 | 1.391752 | 2.217333 | 1.605545 | −1.062253 |
| PCTUC_236 | 1.125475 | −1.08361 | 1.131917 | 1.769547 | 2.291027 |
| PCTUC_237 | 1.95317 | 1.941142 | 2.974464 | 1.987368 | 2.460801 |
| PCTUC_238 | 1.761459 | 1.938436 | 2.437879 | 1.578815 | 1.985001 |
| PCTUC_239 | 2.327703 | 2.005099 | 2.31158 | −1.602604 | −1.592889 |
| PCTUC_240 | 1.797664 | 2.260158 | 1.986103 | 2.107779 | 1.786581 |
| PCTUC_241 | 1.93955 | 1.398541 | 2.159003 | 1.30178 | −1.097629 |
| PCTUC_242 | 2.19824 | 1.927631 | 2.652801 | 1.922133 | 2.28963 |
| PCTUC_243 | 3.253193 | 1.019366 | 1.921647 | −1.062837 | −1.102913 |
| PCTUC_244 | 1.588954 | 1.097882 | 2.41193 | 2.428367 | 2.164614 |
| PCTUC_245 | 1.736485 | 1.296248 | 2.383676 | −1.035178 | −1.085292 |
| PCTUC_246 | 1.596717 | 2.920444 | 2.129318 | 1.721134 | 1.554376 |
| PCTUC_247 | 1.619696 | 3.745029 | 5.322661 | 2.411938 | 3.973129 |
| PCTUC_248 | 1.355851 | 1.913746 | 2.992553 | 2.44081 | 4.331967 |
| PCTUC_249 | 1.296018 | 1.905911 | 2.062311 | 1.5673 | 2.105443 |
| PCTUC_250 | 2.773936 | 1.646017 | 2.262158 | 1.381524 | 1.037847 |
| PCTUC_251 | 1.488182 | 2.978148 | 2.1869 | 1.264823 | 2.8339 |
| PCTUC_252 | 1.3715228 | 1.023197 | 1.937373 | 2.682085 | 1.127316 |
| PCTUC_253 | 2.167365 | 1.996771 | 3.35515 | 1.913116 | 2.732446 |
| PCTUC_254 | 1.82616 | 2.351354 | 2.65802 | 1.413939 | 2.305251 |
| PCTUC_255 | 2.049325 | 2.728652 | 3.495365 | 2.180295 | 3.135996 |
| PCTUC_256 | 2.121907 | 2.668546 | 3.13753 | 2.356709 | 3.027172 |
| PCTUC_257 | 1.593813 | 2.171247 | 2.688064 | 1.854916 | 2.297249 |
| PCTUC_258 | 1.953386 | 3.046884 | 3.450625 | 2.276681 | 3.445494 |
| PCTUC_259 | 2.657611 | 1.752061 | 1.874493 | 1.991144 | 2.031666 |
| PCTUC_260 | 2.835871 | 4.359889 | 5.454328 | 2.956482 | 5.089366 |
| PCTUC_261 | 1.299203 | 1.699995 | 2.17389 | 2.328848 | 3.134634 |
| PCTUC_262 | 2.161551 | 2.553585 | 2.656883 | 1.799782 | 3.511413 |
| PCTUC_263 | 2.628037 | 2.22115 | 3.208899 | 1.673071 | 2.896297 |
| PCTUC_264 | 1.718884 | 2.355733 | 3.086609 | 2.092861 | 2.543259 |
| PCTUC_265 | 1.84443 | 1.990054 | 2.112158 | 1.604318 | 2.454317 |
| PCTUC_266 | 2.752462 | 5.271327 | 7.15142 | 6.201518 | 6.192584 |
| PCTUC_267 | 2.407998 | 2.606209 | 3.376878 | 2.233774 | 3.645929 |
| PCTUC_268 | 2.274251 | 2.286787 | 2.648614 | 2.672675 | 2.851749 |
| PCTUC_269 | 2.225441 | 2.327417 | 2.774195 | 1.849681 | 2.537223 |
| PCTUC_270 | 2.661012 | 3.828418 | 4.091862 | 3.042243 | 5.057569 |
| PCTUC_271 | 1.796683 | 2.179518 | 2.032843 | 2.390726 | 1.577298 |
| PCTUC_272 | 2.978599 | 1.343153 | 2.262219 | 1.054891 | 2.047256 |
| PCTUC_273 | 2.013162 | 2.119559 | 2.517091 | 1.56865 | 2.645934 |
| PCTUC_274 | 2.355896 | 2.007947 | 2.673893 | 1.531729 | 2.325394 |
| PCTUC_275 | 1.900366 | 2.590191 | 3.224328 | 1.998324 | 3.024211 |
| PCTUC_276 | 2.943753 | 6.126108 | 4.642348 | 5.059815 | 5.372001 |
| PCTUC_277 | 1.723907 | 3.269939 | 2.696898 | 2.057062 | 3.182218 |
| PCTUC_278 | 2.094828 | 2.38265 | 2.796767 | 1.854717 | 3.154387 |
| PCTUC_279 | 2.005874 | 2.978029 | 3.26697 | 2.05299 | 2.785948 |
| PCTUC_280 | 1.86396 | 1.957028 | 2.051702 | 1.616621 | 2.17304 |
| PCTUC_281 | 2.376895 | 3.270395 | 3.587495 | 2.29148 | 3.428254 |
| PCTUC_282 | 2.054744 | 2.199522 | 2.702134 | 2.041137 | 2.736642 |
| PCTUC_283 | 1.939767 | 2.589601 | 1.594674 | 1.63263 | 1.671657 |
| PCTUC_284 | 1.987288 | 2.528478 | 2.862927 | 1.735835 | 2.854227 |
| PCTUC_285 | 3.079297 | 6.083429 | 10.085707 | 6.538405 | 6.643817 |
| PCTUC_286 | 2.753213 | 3.59893 | 6.45603 | 5.407847 | 6.728555 |
| PCTUC_287 | 2.047107 | 2.906386 | 3.33462 | 3.347987 | 3.105007 |
| PCTUC_288 | 2.029243 | 1.85862 | 2.220732 | 1.430543 | 1.504025 |
| PCTUC_289 | 2.304952 | 2.399266 | 3.131665 | 1.835088 | 2.654428 |
| PCTUC_290 | 3.251477 | 4.356605 | 5.606828 | 3.09261 | 4.484571 |
| PCTUC_291 | 2.076605 | 2.595305 | 3.074471 | 1.621296 | 3.430257 |
| PCTUC_292 | 1.975275 | 2.718234 | 2.889359 | 3.352547 | 3.627154 |
| PCTUC_293 | 1.694107 | 2.019536 | 2.452825 | 1.697461 | 1.909641 |
| PCTUC_294 | 3.0436 | 2.595452 | 3.706271 | 2.084171 | 3.342356 |
| PCTUC_295 | 2.251134 | 2.904371 | 4.252948 | 2.152901 | 2.987439 |
| PCTUC_296 | 2.087629 | 3.49325 | 4.494589 | 1.443877 | 2.62743 |
| PCTUC_297 | 3.604622 | 7.745868 | 8.334743 | 4.608661 | 6.148468 |
| PCTUC_298 | 1.888779 | 2.302903 | 2.906211 | 1.626086 | 2.653658 |
| PCTUC_299 | 2.391559 | 5.756627 | 5.500046 | 3.411536 | 4.336478 |
| PCTUC_300 | 2.233243 | 2.326694 | 2.733778 | 2.099969 | 2.461344 |
| PCTUC_301 | 1.923591 | 1.734049 | 1.743211 | 1.667224 | 1.550048 |
| PCTUC_302 | 3.607384 | 3.005309 | 4.17177 | 3.054622 | 4.566369 |
| PCTUC_303 | 2.456815 | 1.899414 | 2.440792 | 2.188243 | 1.609168 |
| PCTUC_304 | 2.04325 | 2.31896 | 2.464632 | 1.583972 | 2.481459 |
| PCTUC_305 | 1.96945 | 1.37899 | 2.044353 | 1.11567 | 1.291094 |
| PCTUC_306 | 2.810436 | 3.373838 | 3.438033 | 2.450403 | 3.788159 |
| PCTUC_307 | 1.561316 | 2.133034 | 2.136498 | 1.667441 | 2.387891 |
| PCTUC_308 | 2.46688 | 5.101476 | 5.459764 | 3.302731 | 5.212498 |
| PCTUC_309 | 2.06269 | 3.498287 | 6.679554 | 3.305283 | 5.179197 |
| PCTUC_310 | 1.857961 | 2.588842 | 2.414808 | 2.136176 | 2.981805 |
| PCTUC_311 | 1.936857 | 2.728184 | 2.549392 | 2.345132 | 2.817231 |
| PCTUC_312 | 1.03898 | 1.911259 | 1.606964 | 1.840382 | 3.202574 |
| PCTUC_313 | 2.205216 | 2.254331 | 2.391725 | 1.496214 | 2.017714 |
| PCTUC_314 | 2.204293 | 2.621585 | 2.727868 | 2.266493 | 3.507617 |
| PCTUC_315 | 1.02131 | 1.873907 | 1.595523 | 2.2302 | 3.104499 |
| PCTUC_316 | 2.977269 | 5.084843 | 5.690078 | 4.364601 | 5.182178 |
| PCTUC_317 | 2.332324 | 3.953731 | 4.390101 | 2.765639 | 4.208732 |
| PCTUC_318 | 2.783622 | 5.77487 | 7.181798 | 3.896205 | 5.578665 |
| PCTUC_319 | 3.675624 | 5.221754 | 9.011139 | 1.676277 | 5.093641 |
| PCTUC_320 | 2.882559 | 2.693735 | 3.040426 | 2.081827 | 3.438727 |
| PCTUC_321 | 2.140977 | 1.388092 | 2.195915 | 1.118666 | 1.742483 |
| PCTUC_322 | 2.509368 | 4.285131 | 4.96098 | 3.772761 | 4.72897 |
| PCTUC_323 | 1.807721 | 2.053201 | 2.764767 | 1.650641 | 2.163632 |
| PCTUC_324 | 2.291451 | 2.072965 | 3.084313 | 1.686068 | 2.212211 |
| PCTUC_325 | 1.43054 | 2.912849 | 2.96758 | 3.002518 | 4.049307 |
| PCTUC_326 | 1.678896 | 2.176286 | 2.333714 | 1.653947 | 1.985383 |
| PCTUC_327 | 2.860305 | 4.50753 | 5.71555 | 3.221009 | 5.424201 |
| PCTUC_328 | 3.117953 | 3.532043 | 4.398926 | 2.240857 | 4.636419 |
| PCTUC_329 | 1.938489 | 2.246803 | 2.420075 | 1.885388 | 2.232656 |
| PCTUC_330 | 2.184758 | 1.576406 | 2.325558 | 1.450989 | 2.131205 |
| PCTUC_331 | 2.015503 | 2.105836 | 1.982838 | 1.824007 | 2.105958 |
| PCTUC_332 | 2.157558 | 2.35697 | 2.949601 | 1.824357 | 2.690155 |
| PCTUC_333 | 1.747717 | 2.934819 | 3.938158 | 1.939798 | 2.05878 |
| PCTUC_334 | 1.541244 | 2.08288 | 1.975025 | 1.536793 | 1.95171 |
| PCTUC_335 | 2.159401 | 2.32575 | 2.904458 | 1.605049 | 2.342069 |
| PCTUC_336 | 2.004049 | 2.530914 | 2.241112 | 1.911488 | 2.97038 |
| PCTUC_337 | 1.765664 | 2.402218 | 2.383659 | 1.561228 | 2.706952 |
| PCTUC_338 | 1.932377 | 2.605035 | 2.630431 | 1.97032 | 2.888035 |
| PCTUC_339 | 2.267443 | 2.164635 | 2.673887 | 1.663999 | 2.394497 |
| PCTUC_340 | 2.799647 | 2.489953 | 8.540805 | 2.280929 | 2.772973 |
| PCTUC_341 | 1.771648 | 1.997451 | 2.114003 | 1.511254 | 2.001948 |
| PCTUC_342 | 1.799832 | 2.274296 | 2.631532 | 2.505168 | 3.127952 |
| PCTUC_343 | 1.54815 | 1.723506 | 5.615517 | 2.155862 | 2.497843 |
| PCTUC_344 | 2.388751 | 3.892942 | 4.121072 | 2.506671 | 3.81235 |
| PCTUC_345 | 1.680449 | 1.65429 | 2.882919 | 2.379074 | 2.50676 |
| PCTUC_346 | 2.176567 | 2.489427 | 2.665195 | 2.374072 | 2.848118 |
| PCTUC_347 | 2.884108 | 4.174658 | 5.172139 | 3.595544 | 4.704914 |
| PCTUC_348 | 2.101132 | 2.69651 | 2.75628 | 2.03811 | 2.714414 |
| PCTUC_349 | 2.689832 | 3.726952 | 3.759751 | 2.906675 | 4.511586 |
| PCTUC_350 | 2.086607 | 2.639501 | 3.024416 | 2.016236 | 3.336448 |
| PCTUC_351 | 2.091848 | 2.217803 | 2.631467 | 1.692517 | 2.682757 |
| PCTUC_352 | 2.032929 | 3.296501 | 3.034418 | 2.017581 | 2.898892 |
| PCTUC_353 | 1.889645 | 2.48882 | 2.557603 | 2.039747 | 2.342551 |
| PCTUC_354 | 3.953862 | 6.095821 | 8.179487 | 4.740977 | 6.752993 |
| PCTUC_355 | 2.880915 | 6.314769 | 7.584483 | 4.459912 | 6.731706 |
| PCTUC_356 | 2.344102 | 3.970764 | 3.44365 | 2.745494 | 4.373598 |
| PCTUC_357 | 2.308369 | 2.443851 | 3.30145 | 1.698394 | 2.902148 |
| PCTUC_358 | 1.941134 | 2.458909 | 2.1209 | 1.535128 | 2.417566 |
| PCTUC_359 | 1.974657 | 2.151726 | 2.475451 | 1.630787 | 2.947569 |
| PCTUC_360 | 3.011921 | 3.695467 | 3.223783 | 2.485509 | 3.957333 |
| PCTUC_361 | 1.989847 | 2.630999 | 2.800455 | 1.736644 | 2.927565 |
| PCTUC_362 | 1.756287 | 2.323909 | 2.335853 | 1.741052 | 2.414361 |
| PCTUC_363 | 2.37175 | 2.724983 | 2.471031 | 1.969971 | 2.817292 |
| PCTUC_364 | 2.99462 | 7.012845 | 6.196832 | 4.300729 | 5.887486 |
| PCTUC_365 | 2.21789 | 2.560786 | 2.625995 | 1.882286 | 2.305182 |
| PCTUC_366 | 2.990927 | 3.261907 | 4.190991 | 3.234589 | 4.369407 |
| PCTUC_367 | 2.475569 | 2.606431 | 3.400553 | 2.48203 | 4.506122 |
| PCTUC_368 | 2.480668 | 3.439268 | 3.868262 | 3.597644 | 4.642876 |
| PCTUC_369 | −3.459225 | 3.245049 | 4.811554 | 5.0354 | |
| PCTUC_370 | 2.586246 | 3.630464 | 3.817188 | 2.615044 | 3.206606 |
| PCTUC_371 | 2.042603 | 1.004502 | 1.733275 | −1.294235 | −1.174134 |
| PCTUC_372 | 1.782903 | 2.419052 | 1.935022 | 1.625869 | 2.765687 |
| PCTUC_373 | 3.25888 | 2.063588 | 2.796654 | 1.830389 | 3.526159 |
| PCTUC_374 | 1.902272 | 2.083588 | 2.688988 | 1.345831 | 2.268873 |
| PCTUC_375 | 1.955749 | 1.43164 | 2.129483 | 1.254105 | 1.893949 |
| PCTUC_376 | 1.323888 | 2.214069 | 3.194154 | 2.050849 | 3.22952 |
| PCTUC_377 | 1.422594 | 2.470438 | 2.485046 | 2.02962 | 2.999551 |
| PCTUC_378 | 1.764847 | 2.037436 | 1.920452 | 1.353655 | 2.452314 |
| PCTUC_379 | 1.901509 | 2.479268 | 2.474901 | 1.896021 | 2.365896 |
| PCTUC_380 | 1.992917 | 1.760941 | 1.825539 | 1.185322 | 1.118641 |
| PCTUC_381 | 2.835555 | 4.980717 | 5.563924 | 4.130403 | 4.843069 |
| PCTUC_382 | 2.440718 | 3.481834 | 3.938086 | 2.907352 | 3.69767 |
| PCTUC_383 | 2.346514 | 2.061869 | 2.414692 | 1.614143 | 2.345685 |
| PCTUC_384 | 2.00554 | 2.358657 | 2.839284 | 2.372556 | 2.932624 |
| PCTUC_385 | 3.006696 | 2.695292 | 3.407489 | 2.419821 | 2.835872 |
| PCTUC_386 | 2.763716 | 4.548329 | 4.304034 | 2.650025 | 4.261168 |
| PCTUC_387 | 2.20499 | 3.004974 | 4.803649 | 3.60179 | 5.225955 |
| PCTUC_388 | 2.022286 | 2.602177 | 2.56764 | 1.487003 | 2.454711 |
| PCTUC_389 | 2.252397 | 1.349243 | 1.221948 | 1.085022 | 1.005355 |
| PCTUC_390 | 1.984737 | 1.886508 | 2.053055 | 1.276402 | 2.213593 |
| PCTUC_391 | 3.243428 | 4.212927 | 5.989446 | 3.823582 | 4.467264 |
| PCTUC_392 | 2.458363 | 2.53442 | 2.895445 | 2.231894 | 2.968892 |
| PCTUC_393 | 3.080195 | 2.562047 | 3.199905 | 1.644047 | 3.09701 |
| PCTUC_394 | 2.052922 | 1.485163 | 1.791144 | 1.482122 | 1.784639 |
| PCTUC_395 | 1.253237 | 1.754702 | 1.58624 | 1.737612 | 2.136938 |
| PCTUC_396 | 1.881169 | 2.456162 | 2.70796 | 2.091553 | 3.12313 |
| PCTUC_397 | 2.737342 | 2.910623 | 3.234478 | 2.156349 | 3.741645 |
| PCTUC_398 | 2.22809 | 1.460816 | 1.831952 | 1.041979 | 1.742374 |
| PCTUC_399 | 2.078429 | 2.442215 | 2.528577 | 1.249963 | 2.603135 |
| PCTUC_400 | 2.335688 | 1.93176 | 2.166172 | 1.336475 | 2.095809 |
| PCTUC_402 | 1.977784 | 1.942955 | 2.510741 | 1.574066 | 2.099593 |
| PCTUC_403 | 2.107548 | 2.115424 | 2.946819 | 1.726075 | 2.634579 |
| PCTUC_404 | 2.710852 | 2.382079 | 2.82944 | 2.009431 | 3.281803 |
| PCTUC_406 | 2.587248 | 2.348621 | 2.849712 | 1.686074 | 3.148104 |
| PCTUC_407 | 2.549039 | 3.362665 | 3.465319 | 2.534939 | 3.891845 |
| PCTUC_408 | 2.040769 | 2.560151 | 2.755626 | 1.725474 | 2.550859 |
| PCTUC_409 | 1.32847 | 1.948556 | 2.156865 | 1.743222 | 2.468351 |
| PCTUC_410 | 3.361394 | 4.898874 | 2.030213 | 2.812655 | |
| PCTUC_411 | 2.79521 | 1.793024 | 2.306354 | 1.328428 | 2.059772 |
| PCTUC_412 | 2.34141 | 2.07978 | 2.673887 | 1.493052 | 2.363667 |
| PCTUC_413 | 2.890792 | 4.322053 | 6.235146 | 2.594052 | 4.245276 |
| PCTUC_414 | 2.853143 | 3.271439 | 4.594022 | 2.097916 | 3.826796 |
| PCTUC_415 | 2.271866 | 2.004488 | 2.366559 | 1.588667 | 2.669858 |
| PCTUC_416 | 2.875755 | 3.032918 | 3.50868 | 2.250973 | 3.846255 |
| PCTUC_417 | 2.123813 | 2.482459 | 3.225545 | 1.897321 | 3.052733 |
| PCTUC_418 | 2.402113 | 2.174567 | 2.789737 | 2.576604 | 3.115066 |
| PCTUC_419 | 2.443327 | 2.057769 | 2.229288 | 1.63313 | 2.138522 |
| PCTUC_420 | 2.391559 | 2.380276 | 3.909662 | 1.890675 | 3.059867 |
| PCTUC_421 | 1.077536 | 2.594693 | 2.030645 | 2.401612 | 3.816474 |
| PCTUC_422 | 2.4507 | 1.751342 | 1.914153 | −1.994129 | −1.623521 |
| PCTUC_423 | 2.489001 | 2.474573 | 3.171004 | 1.814375 | 2.506032 |
| PCTUC_424 | 2.635959 | 6.207118 | 3.261327 | 2.182814 | 3.921246 |
| PCTUC_425 | 1.936564 | 2.257473 | 2.348564 | 1.621156 | 2.343169 |
| PCTUC_426 | 2.787 | 6.023342 | 6.340659 | 3.623966 | 5.023 |
| PCTUC_427 | 1.963182 | 2.59146 | 3.218375 | 1.981801 | 3.276546 |
| PCTUC_428 | 2.811955 | 4.697448 | 6.932314 | 3.533367 | 6.558954 |
| PCTUC_429 | 2.936883 | 4.995127 | 1.960985 | 2.883196 | 5.37323 |
| PCTUC_430 | 2.638209 | 4.390141 | 5.727512 | 2.911126 | 4.250409 |
| PCTUC_431 | 2.476889 | 3.380067 | 4.27829 | 2.543056 | 3.997764 |
| PCTUC_432 | 2.911814 | 1.989612 | 2.598813 | 1.571292 | 2.986079 |
| PCTUC_433 | 2.806021 | 3.194487 | 5.832902 | 3.000723 | 4.362042 |
| PCTUC_434 | 2.40136 | 3.17905 | 4.093861 | 1.955503 | 3.334149 |
| PCTUC_435 | 2.182042 | 2.924546 | 2.469926 | 2.081802 | 2.473711 |
| PCTUC_436 | 2.012068 | 1.624249 | 1.893484 | 1.304093 | 2.132982 |
| PCTUC_437 | 2.809489 | 8.348773 | 7.651482 | 5.333182 | 8.055189 |
| PCTUC_438 | 2.717542 | 4.266325 | 3.728613 | 3.076244 | 4.921318 |
| PCTUC_439 | 2.298005 | 2.509704 | 3.263963 | 1.49895 | 2.93489 |
| PCTUC_440 | 1.964941 | 2.645994 | 2.86284 | 1.821599 | 2.942023 |
| PCTUC_441 | 2.465924 | 2.763208 | 3.583939 | 2.550073 | 3.728398 |
| PCTUC_442 | 2.008205 | 2.701962 | 5.927336 | 1.823643 | 2.574186 |
| PCTUC_443 | 1.985571 | 1.791218 | 1.924718 | 1.65177 | 2.492881 |
| PCTUC_444 | 1.684871 | 2.639715 | 3.409781 | 1.514741 | 1.895138 |
| PCTUC_445 | 1.630364 | 3.215146 | 4.502505 | 3.277213 | 4.260717 |
| PCTUC_446 | 2.321074 | 3.346376 | 3.889021 | 2.635538 | 3.747683 |
| PCTUC_447 | 1.961918 | 2.018709 | 2.225815 | 1.469813 | 2.509177 |
| PCTUC_448 | 1.269913 | 2.187302 | 2.122471 | 1.998752 | 3.300487 |
| PCTUC_449 | 2.727314 | 6.261316 | 6.267126 | 4.693824 | 5.379424 |
| PCTUC_450 | 3.197335 | 4.956213 | 5.617073 | 3.907706 | 5.66407 |
| PCTUC_451 | 2.0707 | 3.137932 | 2.992602 | 1.916229 | 2.724454 |
| PCTUC_452 | 1.984737 | 1.36334 | 1.379513 | 1.280376 | 1.428708 |
| PCTUC_453 | 1.876505 | 3.497016 | 3.878442 | 2.477252 | 3.548843 |
| PCTUC_454 | 1.910458 | 1.869281 | 2.309147 | 1.478462 | 2.101685 |
| PCTUC_455 | 2.793179 | 3.666803 | 4.352312 | 2.484562 | 4.184809 |
| PCTUC_456 | −1.00204 | 1.287843 | 1.276185 | 1.068495 | 1.467703 |
| PCTUC_457 | 1.918738 | 2.538246 | 2.341118 | 1.655009 | 2.175128 |
| PCTUC_458 | 1.962578 | 3.124843 | 2.788344 | 1.466358 | 2.728292 |
| PCTUC_459 | 2.111142 | 1.830646 | 2.40658 | 1.115848 | 2.081882 |
| PCTUC_460 | 2.965396 | 3.735419 | 3.885926 | 2.441958 | 4.66639 |
| PCTUC_461 | 1.967691 | 2.630139 | 3.61916 | 2.220422 | 4.227802 |
| PCTUC_462 | 2.688921 | 1.809321 | 2.077108 | −1.119729 | −1.12931 |
| PCTUC_464 | 1.986388 | 3.7569 | 4.555263 | 1.884179 | 3.803697 |
| PCTUC_467 | 1.740369 | 2.339638 | 2.211905 | 1.92208 | 2.029057 |
| PCTUC_468 | 2.748851 | 3.820414 | 5.352636 | 3.791035 | 4.472126 |
| PCTUC_469 | 2.591887 | 3.058516 | 4.370934 | 2.663233 | 3.267893 |
| PCTUC_470 | 3.424826 | 8.002387 | 11.349638 | 7.409304 | 7.896651 |
| PCTUC_471 | 2.095686 | 2.172105 | 3.294361 | 1.948187 | 3.010162 |
| PCTUC_472 | 3.56209 | 4.849838 | 5.889228 | 4.071405 | 6.342055 |
| PCTUC_473 | 2.348436 | 3.795649 | 4.221846 | 2.31603 | 3.951533 |
| PCTUC_474 | 2.14509 | 3.216147 | 4.660154 | 2.7524 | 5.420599 |
| PCTUC_475 | 3.35751 | 6.479264 | 8.310672 | 5.376397 | 6.879448 |
| PCTUC_476 | 2.671123 | 4.650983 | 5.04074 | 3.253613 | 4.819563 |
| PCTUC_477 | 2.387151 | 2.945137 | 3.255189 | 2.492054 | 2.513826 |
| PCTUC_478 | 2.645504 | 4.693357 | 7.934476 | 4.227252 | 5.576314 |
| PCTUC_479 | 2.699603 | 5.376858 | 7.113347 | 4.423897 | 5.450957 |
| PCTUC_480 | 2.322522 | 2.093338 | 2.796594 | 1.619356 | 2.265154 |
| PCTUC_481 | 1.346006 | 3.905318 | 2.776636 | 3.143842 | 3.796467 |
| PCTUC_482 | 2.862653 | 6.053042 | 5.972333 | 4.49482 | 5.577618 |
| PCTUC_483 | 2.420212 | 3.421625 | 3.582682 | 2.395104 | 3.517098 |
| PCTUC_484 | 2.371871 | 3.803153 | 3.727755 | 2.296599 | 3.348165 |
| PCTUC_485 | 2.112958 | 1.907894 | 2.063742 | 1.316474 | 1.965625 |
| PCTUC_486 | 2.540716 | 5.23061 | 5.541661 | 4.039124 | 4.86787 |
| PCTUC_487 | 2.620514 | 3.613905 | 4.692163 | 2.593385 | 4.190191 |
| PCTUC_488 | 2.670145 | 4.679341 | 5.579667 | 3.789751 | 4.612708 |
| PCTUC_489 | 2.434191 | 3.85106 | 4.174643 | 2.855676 | 4.725146 |
| PCTUC_490 | 1.00053 | 2.110267 | 1.543375 | 2.442942 | 3.5069 |
| PCTUC_491 | 2.92511 | 2.435802 | 2.331618 | 1.966097 | 2.968132 |
| PCTUC_492 | 2.268654 | 2.685976 | 2.430065 | 1.627878 | 2.18276 |
| PCTUC_493 | 2.431231 | 1.919509 | 2.458445 | 1.699867 | 1.642623 |
| PCTUC_494 | 1.785818 | 1.975354 | 1.989132 | 1.672897 | 2.13476 |
| PCTUC_495 | 1.660831 | 2.083885 | 2.297657 | 2.914436 | 3.204953 |
| PCTUC_496 | −1.007082 | 2.12366 | 1.591845 | 2.178094 | 2.857278 |
| PCTUC_497 | 1.323915 | 1.730687 | 2.357525 | 1.763247 | 3.182555 |
| PCTUC_498 | 1.819995 | 2.924548 | 2.83141 | 1.952073 | 2.535718 |
| PCTUC_499 | 1.103923 | 1.935671 | 1.822613 | 2.506015 | 2.594218 |
| PCTUC_500 | 2.108564 | 2.599634 | 3.275906 | 2.786753 | 4.39258 |
| PCTUC_501 | 2.202682 | 1.428914 | 1.944631 | 1.495945 | 2.239097 |
| PCTUC_502 | 1.511049 | 2.666108 | 2.601538 | 2.911196 | 3.460927 |
| PCTUC_503 | 2.016269 | 1.952843 | 1.82467 | 1.463055 | 2.126049 |
| PCTUC_504 | 2.329668 | 2.567232 | 2.692213 | 1.521157 | 2.197148 |
| PCTUC_505 | 1.591243 | 2.751235 | 2.449544 | 1.66492 | 2.427388 |
| PCTUC_506 | 2.183582 | 1.918865 | 1.706821 | 1.224784 | 1.548311 |
| PCTUC_507 | 2.121192 | 2.149194 | 2.676733 | 1.717022 | 2.754955 |
| PCTUC_508 | 1.958871 | 1.943062 | 1.667803 | 1.494308 | 2.107172 |
| PCTUC_509 | 1.933163 | 1.725295 | 1.748657 | −1.138867 | 1.133237 |
| PCTUC_510 | 1.468092 | 2.099357 | 1.940111 | 1.872053 | 2.135083 |
| PCTUC_511 | 2.154159 | 2.097517 | 2.410887 | 1.261737 | 2.364517 |
| PCTUC_512 | 1.147774 | 1.783252 | 2.252219 | 2.044234 | 3.814058 |
| PCTUC_513 | 2.47837 | 2.887622 | 3.551895 | 1.792477 | 2.975644 |
| PCTUC_514 | 2.867124 | 2.561581 | 2.992617 | 1.677437 | 2.835756 |
| PCTUC_515 | 1.627145 | 2.312069 | 2.810126 | 1.996169 | 2.617225 |
| PCTUC_516 | 1.726031 | 2.281983 | 3.149352 | 2.109466 | 3.559903 |
| PCTUC_517 | 2.849573 | 3.00185 | 3.49281 | 2.722194 | 4.174789 |
| PCTUC_518 | 2.27343 | 4.425375 | 6.756968 | 4.773911 | 6.573621 |
| PCTUC_519 | 2.797114 | 3.013171 | 2.941275 | 2.861877 | 3.896014 |
| PCTUC_520 | 2.145546 | 1.51115 | 2.011956 | 1.136702 | 1.394944 |
| PCTUC_521 | 2.110756 | 3.817168 | 3.857475 | 2.626673 | 4.603748 |
| PCTUC_522 | 2.805435 | 2.143939 | 2.405287 | 1.943805 | 3.157292 |
| PCTUC_523 | 2.232193 | 2.524796 | 2.664089 | 1.784314 | 2.867758 |
| PCTUC_524 | 2.433354 | 2.742706 | 3.018785 | 2.42759 | 3.763151 |
| PCTUC_525 | 2.042445 | 3.087261 | 3.427543 | 2.131444 | 3.138867 |
| PCTUC_526 | 1.819044 | 1.85444 | 2.008788 | 1.4249 | 2.145726 |
| PCTUC_527 | 3.182961 | 6.456305 | 7.971256 | 7.174463 | 6.581938 |
| PCTUC_528 | 2.512796 | 5.234399 | 6.328454 | 4.522633 | 6.481423 |
| PCTUC_529 | 1.915459 | 1.857537 | 1.934087 | 1.285698 | 1.914062 |
| PCTUC_530 | 2.551965 | 3.05574 | 3.508546 | 2.27785 | 4.110225 |
| PCTUC_531 | 2.315542 | 2.948552 | 3.496778 | 1.73247 | 2.323464 |
| PCTUC_532 | 2.570683 | 2.284815 | 2.635896 | 2.962807 | 2.741162 |
| PCTUC_533 | 3.050366 | 2.7762 | 3.603807 | 3.006189 | 3.681454 |
| PCTUC_534 | 1.973636 | 2.828246 | 3.083603 | 1.815389 | 3.059071 |
| PCTUC_535 | 2.341728 | 3.394196 | 4.137745 | 3.503355 | 3.483258 |
| PCTUC_536 | 5.155655 | 5.988683 | 5.516017 | 6.628252 | |
| PCTUC_537 | 2.447649 | 5.432794 | 4.880079 | 3.579062 | 5.154306 |
| PCTUC_538 | 2.296285 | 2.399659 | 2.631008 | 1.729843 | 2.877178 |
| PCTUC_539 | 1.995681 | 1.760945 | 1.987853 | 1.698475 | 2.458658 |
| PCTUC_540 | 2.941353 | 1.844049 | 2.175175 | 1.444954 | 1.928482 |
| PCTUC_541 | 2.275076 | 2.124308 | 2.580506 | 1.574504 | 2.246783 |
| PCTUC_542 | 2.051276 | 1.402258 | 2.145409 | 1.243739 | 2.369804 |
| PCTUC_543 | 1.959295 | 1.987292 | 2.511984 | 1.558444 | 2.087383 |
| PCTUC_544 | 2.557583 | 3.232352 | 3.451574 | 2.111259 | 3.616122 |
| PCTUC_545 | 2.308393 | 2.793809 | 3.41116 | 1.722354 | 3.360532 |
| PCTUC_546 | 2.525068 | 2.366782 | 3.208857 | 1.82044 | 3.108346 |
| PCTUC_547 | 2.245233 | 1.469712 | 1.604138 | −1.492083 | −1.072894 |
| PCTUC_548 | 2.260957 | 2.562115 | 3.803141 | 1.176394 | 1.92117 |
| PCTUC_549 | 1.578194 | 2.249098 | 2.658492 | −1.194468 | 1.463275 |
| PCTUC_550 | 2.306434 | 2.517305 | 2.607248 | 1.930816 | 2.87325 |
| PCTUC_551 | 1.988129 | 1.546736 | 1.716089 | 1.394948 | 1.991959 |
| PCTUC_552 | 2.573594 | 2.512912 | 2.64596 | 1.937291 | 2.563375 |
| PCTUC_553 | 2.185575 | 2.258192 | 2.0861 | 1.424623 | 2.222347 |
| PCTUC_554 | 2.341026 | 4.148862 | 4.517709 | 2.382762 | 4.91679 |
| PCTUC_555 | 2.190103 | 2.354151 | 2.306093 | 1.419395 | 2.184773 |
| PCTUC_556 | 2.630554 | 2.111118 | 2.346193 | 1.319616 | 2.781438 |
| PCTUC_557 | 2.332639 | 2.480744 | 2.815126 | 1.940635 | 2.798939 |
| PCTUC_558 | 1.665789 | 2.06459 | 2.231466 | 1.619472 | 2.350911 |
| PCTUC_559 | 2.205838 | 2.108767 | 2.029673 | 1.304332 | 2.039695 |
| PCTUC_560 | 2.452425 | 4.978587 | 4.384961 | 3.288052 | 3.699426 |
| PCTUC_561 | 3.724798 | 2.758653 | 1.581049 | −1.079886 | 1.651879 |
| PCTUC_562 | 1.458079 | 2.06474 | 2.293924 | 2.117243 | 2.045964 |
| PCTUC_563 | 1.330289 | 2.358853 | 2.966393 | 3.292261 | 2.070739 |
| PCTUC_564 | 1.398376 | 1.335047 | 2.796356 | 3.870261 | 3.021988 |
| PCTUC_565 | 1.642279 | 2.27982 | 2.227257 | 2.123359 | 2.019439 |
| PCTUC_566 | 1.794402 | 2.498483 | 2.64332 | 2.308097 | 2.197079 |
| PCTUC_568 | 1.744485 | 2.015622 | 2.518641 | 2.257252 | 2.248926 |
| PCTUC_569 | 2.901726 | −1.50788 | 3.395245 | 2.128505 | −1.653142 |
| PCTUC_570 | 1.150738 | 4.060815 | 3.067239 | 3.349717 | 2.06671 |
| PCTUC_571 | 2.047153 | −1.008306 | 1.45744 | −1.386172 | −2.112743 |
| PCTUC_572 | −1.194861 | 3.665618 | −1.085841 | 3.47144 | 3.62577 |
| PCTUC_573 | 1.879792 | 2.448401 | 2.685976 | 2.137358 | 2.185858 |
| PCTUC_574 | 1.815429 | 2.230381 | 2.324055 | 1.982066 | 1.956972 |
| PCTUC_575 | 2.050044 | 2.155466 | 2.329984 | 2.099358 | 2.332833 |
| PCTUC_576 | 1.846621 | 2.27799 | 3.027295 | 1.976763 | 2.776882 |
| PCTUC_577 | 1.747903 | 2.632668 | 2.756806 | 2.36739 | 2.146093 |
| PCTUC_578 | 2.186524 | 2.089006 | 2.601211 | 1.727324 | 1.500667 |
| PCTUC_579 | 2.210933 | 1.89179 | 4.36574 | 2.389901 | 2.087243 |
| PCTUC_580 | 2.106504 | 1.186451 | 2.692309 | 2.473882 | 1.343175 |
| PCTUC_581 | 1.456263 | 3.17164 | 11.32385 | 2.588184 | 5.754287 |
| PCTUC_582 | 2.614078 | 1.645149 | 1.820179 | −2.838872 | −2.738889 |
| PCTUC_583 | 3.318897 | 1.427448 | 1.565843 | 1.878233 | 1.184871 |
| PCTUC_584 | 1.954525 | 1.144457 | −1.009171 | 1.257005 | −1.396045 |
| PCTUC_585 | 2.765282 | 2.180095 | 2.33827 | 2.243864 | 2.836234 |
| PCTUC_586 | 2.133562 | 2.115911 | 3.00543 | 1.91642 | 1.857386 |
| PCTUC_587 | 2.549655 | 1.498298 | −1.012961 | −1.919216 | −2.147842 |
| PCTUC_588 | 1.542745 | 3.807242 | 2.343264 | 2.309335 | 2.6663 |
| PCTUC_589 | 2.052527 | 2.493824 | 2.967375 | 2.424135 | 2.66706 |
| PCTUC_590 | 1.623075 | 3.704542 | 3.459654 | 2.542809 | 2.654304 |
| PCTUC_591 | 1.983467 | 2.169764 | 1.540234 | 1.987544 | −1.006504 |
| PCTUC_592 | 2.239261 | 2.481292 | 2.64519 | 1.770056 | 1.99023 |
| PCTUC_593 | 2.071805 | 2.562777 | 4.070767 | 3.268451 | 2.346879 |
| PCTUC_594 | 1.74096 | 3.361343 | 3.544527 | 3.864242 | 2.743535 |
| PCTUC_595 | 1.559802 | 1.904926 | 2.265164 | 2.075392 | 1.901483 |
| PCTUC_596 | 1.784124 | 2.275661 | 3.585576 | 2.084074 | 2.095021 |
| PCTUC_597 | 3.159435 | −1.697335 | 4.054702 | 1.388331 | −8.53404 |
| PCTUC_598 | 1.75033 | 2.718441 | 2.196595 | 2.09338 | 1.579785 |
| PCTUC_599 | 2.099691 | 2.677208 | 2.061399 | 2.272578 | 1.872414 |
| PCTUC_600 | 2.130302 | 1.908707 | 2.488858 | 1.399387 | −1.326734 |
| PCTUC_601 | 1.462605 | 3.064583 | 3.174861 | 1.935508 | 9.527042 |
| PCTUC_602 | 1.700839 | 1.833059 | 2.171972 | 2.079844 | 1.662449 |
| PCTUC_603 | −1.584713 | −1.579554 | 1.63215 | −1.17958 | 1.944797 |
| PCTUC_604 | 2.68338 | 2.241231 | 4.40873 | 2.714834 | 2.437561 |
| PCTUC_605 | 1.898492 | 1.350918 | 2.222734 | 1.083346 | 1.33569 |
| PCTUC_606 | 1.581753 | 2.66108 | 2.529084 | 2.030086 | 1.452565 |
| PCTUC_607 | 1.654599 | 2.324419 | 2.59917 | 2.451451 | 2.103469 |
| PCTUC_608 | 2.086731 | 3.106404 | 4.167883 | 2.874574 | 1.804172 |
| PCTUC_609 | 1.772983 | 3.051194 | 4.351245 | 2.107334 | 2.227571 |
| PCTUC_610 | 3.519794 | 5.237543 | 3.504589 | 2.221707 | 2.152098 |
| PCTUC_611 | 2.276961 | 3.20788 | 3.081503 | 2.240111 | 1.793533 |
| PCTUC_612 | 1.659303 | 2.216207 | 2.995906 | 2.361989 | 1.927937 |
| PCTUC_613 | 1.55503 | 2.021138 | 2.085583 | 2.246955 | 2.521659 |
| PCTUC_614 | 2.65174 | 3.898009 | 4.171721 | 3.421649 | 3.565886 |
| PCTUC_615 | 1.978197 | 4.354056 | 1.955533 | −1.100134 | −1.1857 |
| PCTUC_616 | 1.862664 | 2.006837 | 2.45286 | 2.204572 | 2.003495 |
| PCTUC_617 | 1.696718 | 2.119472 | 2.426069 | 2.377271 | 2.046716 |
| PCTUC_618 | 2.89914 | 4.475184 | 7.241369 | 5.205436 | 4.131087 |
| PCTUC_619 | 2.321978 | 3.009422 | 3.721688 | 3.073065 | 2.042396 |
| PCTUC_620 | 2.167707 | 2.134956 | 2.298337 | 1.714914 | 2.049021 |
| PCTUC_621 | 2.116471 | 6.734607 | 4.110401 | 3.675307 | 3.180559 |
| PCTUC_622 | 2.514078 | 2.875581 | 3.276011 | 2.336778 | 3.035044 |
| PCTUC_623 | 2.605199 | 3.487387 | 3.974484 | 4.055721 | 4.236562 |
| PCTUC_624 | 2.118815 | 3.457612 | 3.882709 | 2.828475 | 2.821918 |
| PCTUC_625 | 2.081784 | 3.337394 | −1.713592 | 3.08825 | 2.179591 |
| PCTUC_626 | 3.007421 | 5.284403 | 6.718605 | 5.273727 | 5.698007 |
| PCTUC_627 | 1.7371 | 2.475792 | 2.327755 | 1.602649 | 2.6975 |
| PCTUC_628 | 2.56408 | 2.984585 | 3.741057 | 3.25906 | 2.476948 |
| PCTUC_629 | 2.044725 | 1.800382 | 3.497649 | 1.133335 | 1.157579 |
| PCTUC_630 | 2.048723 | 2.555925 | 3.197447 | 2.384872 | 2.957937 |
| PCTUC_631 | 1.987264 | 2.027627 | 2.22932 | 1.486664 | 1.569272 |
| PCTUC_632 | 1.508266 | 2.289024 | 2.49168 | 1.969036 | 1.942292 |
| PCTUC_633 | 1.711891 | 2.335012 | 2.855269 | 2.77205 | 2.872453 |
| PCTUC_634 | 1.85976 | 2.048713 | 2.137747 | 1.426612 | 1.078268 |
| PCTUC_635 | 1.950333 | 1.993799 | 2.140466 | 2.074382 | 2.244986 |
| PCTUC_636 | 1.790172 | 2.568077 | 2.913422 | 2.262483 | 2.405525 |
| PCTUC_637 | 1.079308 | 2.512235 | 1.88564 | 2.880826 | 2.823866 |
| PCTUC_638 | 2.067919 | 1.923353 | 2.435373 | 2.128093 | 2.20338 |
| PCTUC_639 | 1.966816 | 3.490128 | 3.441771 | 2.172453 | 1.944276 |
| PCTUC_640 | 2.489141 | 8.613799 | 5.361654 | 4.848388 | 3.89614 |
| PCTUC_641 | 2.574851 | 5.807697 | 5.468801 | 4.90076 | 4.871609 |
| PCTUC_642 | 2.463501 | 4.48316 | 4.04062 | 3.272967 | 3.171938 |
| PCTUC_643 | 2.352794 | 3.681963 | 4.545543 | 4.167448 | 3.945667 |
| PCTUC_644 | 2.748792 | 4.362951 | 6.57235 | 4.583384 | 4.447282 |
| PCTUC_645 | 2.083058 | 3.503422 | 3.768635 | 3.508003 | 2.443652 |
| PCTUC_646 | 2.187366 | 2.567158 | 3.634599 | 3.011877 | 2.432719 |
| PCTUC_647 | 1.962954 | 3.286385 | 3.175565 | 2.436413 | 3.026659 |
| PCTUC_648 | 1.610516 | 2.408909 | 2.309618 | 2.284194 | 1.903609 |
| PCTUC_649 | 2.738749 | 5.635113 | 8.772574 | 6.176256 | 5.03567 |
| PCTUC_650 | 2.598258 | 4.604433 | 4.868678 | 5.932552 | 3.396743 |
| PCTUC_651 | 1.925645 | 3.539554 | 2.666421 | 2.136865 | 2.279523 |
| PCTUC_652 | 2.913148 | 4.555728 | 1.156568 | 4.910597 | 4.307831 |
| PCTUC_653 | 2.767277 | 5.956202 | 1.555341 | 6.13508 | 5.008499 |
| PCTUC_654 | 2.331898 | 2.444826 | 2.8718 | 2.382006 | 2.741199 |
| PCTUC_655 | 1.224894 | 2.950068 | 2.167558 | 3.359763 | 3.099351 |
| PCTUC_656 | 2.362089 | 3.633137 | 4.458858 | 3.959656 | 3.985284 |
| PCTUC_657 | 2.150204 | 2.150625 | 3.353007 | 2.31164 | 2.392572 |
| PCTUC_658 | 1.644417 | 2.892346 | 2.837056 | 2.655083 | 2.161197 |
| PCTUC_659 | 1.973494 | 1.78177 | 2.413365 | 2.113657 | 1.750194 |
| PCTUC_660 | 2.166205 | 2.403092 | 3.011296 | 1.741263 | 1.859095 |
| PCTUC_661 | 1.715786 | 2.752077 | 2.625633 | 2.526097 | 2.552588 |
| PCTUC_662 | 2.663858 | 5.457253 | 6.366603 | 5.702743 | 5.768478 |
| PCTUC_663 | 2.356379 | 4.800281 | 5.678669 | 5.463997 | 4.923267 |
| PCTUC_664 | 1.986381 | 1.856272 | 2.469981 | 2.215134 | 2.151767 |
| PCTUC_665 | 2.495689 | 3.434863 | 3.68608 | 3.742092 | 3.742618 |
| PCTUC_666 | 3.220485 | 6.93086 | 9.153201 | 5.997135 | 5.199389 |
| PCTUC_667 | 1.611768 | 2.271733 | 2.909057 | 3.039583 | 2.493955 |
| PCTUC_668 | 1.648326 | 1.919215 | 2.367546 | 1.940866 | 2.018715 |
| PCTUC_669 | 1.908394 | 2.337281 | 2.577075 | 1.47188 | 1.641456 |
| PCTUC_670 | 2.070219 | 2.981058 | 3.041791 | 2.489966 | 2.225878 |
| PCTUC_671 | 1.709244 | 2.416751 | 2.559589 | 2.054646 | 2.06568 |
| PCTUC_672 | 2.727472 | 4.420219 | 4.758027 | 4.863633 | 4.530597 |
| PCTUC_673 | 1.934935 | 2.240915 | 3.633712 | 2.146384 | 2.153216 |
| PCTUC_674 | 2.743376 | 5.589533 | 5.753892 | 4.882175 | 5.347692 |
| PCTUC_675 | 2.173746 | 2.78693 | 2.843419 | 2.028366 | 1.98453 |
| PCTUC_676 | 2.187662 | 2.288546 | 2.932474 | 2.404961 | 2.084628 |
| PCTUC_677 | 1.438577 | 2.052207 | 1.749069 | 2.615633 | 2.229117 |
| PCTUC_678 | 2.203922 | 2.936104 | 3.330144 | 3.415096 | 3.076645 |
| PCTUC_679 | 1.973946 | 3.2316 | 2.814185 | 4.022079 | 2.479098 |
| PCTUC_680 | 2.046929 | 2.532627 | 2.774914 | 1.819864 | 1.925472 |
| PCTUC_681 | 2.276395 | 3.817427 | 4.516187 | 2.855823 | 3.798191 |
| PCTUC_682 | 2.315317 | 3.596598 | 4.557338 | 3.690554 | 3.464538 |
| PCTUC_683 | 2.056906 | 4.222321 | 4.727066 | 3.607633 | 3.268795 |
| PCTUC_684 | 2.503668 | 4.190849 | 5.953754 | 4.558081 | 4.440939 |
| PCTUC_685 | 2.345897 | 2.715857 | 3.245863 | 2.231445 | 2.50942 |
| PCTUC_686 | 2.165409 | 4.294438 | 4.208843 | 3.325176 | 2.755725 |
| PCTUC_687 | 2.074088 | 1.869166 | 2.815679 | 1.490269 | 1.342491 |
| PCTUC_688 | 1.99125 | 1.958521 | 2.333184 | 1.27325 | −1.066773 |
| PCTUC_689 | 2.131139 | 2.383163 | 2.505348 | 2.325377 | 2.199408 |
| PCTUC_690 | 2.50947 | 5.384008 | 6.459625 | 5.017322 | 4.32398 |
| PCTUC_691 | 2.205507 | 2.210307 | 2.322275 | 2.126769 | 2.07638 |
| PCTUC_692 | 2.224838 | 2.85757 | 3.214349 | 3.428101 | 2.408178 |
| PCTUC_693 | 1.548608 | 2.368227 | 2.242102 | 2.130813 | 1.939746 |
| PCTUC_694 | 2.199028 | 2.382027 | 2.465793 | 1.909728 | 2.059906 |
| PCTUC_695 | 2.287057 | 3.326586 | 3.396893 | 2.944132 | 2.388609 |
| PCTUC_696 | 1.970905 | 2.222844 | 2.797527 | 3.212934 | 2.826079 |
| PCTUC_697 | 2.347556 | 3.192369 | 4.477496 | 3.643991 | 3.435004 |
| PCTUC_698 | 2.125621 | 2.448727 | 3.056476 | 2.241038 | 2.410933 |
| PCTUC_699 | 2.635933 | 4.609246 | 6.675708 | 4.95645 | 4.966762 |
| PCTUC_700 | 1.983465 | 2.705402 | 2.346061 | 1.430664 | −1.167211 |
| PCTUC_701 | 2.144452 | 3.534742 | 4.30228 | 3.916895 | 3.484727 |
| PCTUC_702 | 2.109074 | 3.338197 | 4.553086 | 3.53563 | 3.263711 |
| PCTUC_703 | 2.852373 | 5.956202 | 6.243945 | 4.714651 | 5.417841 |
| PCTUC_704 | 2.132345 | 2.505468 | 3.092073 | 2.572824 | 2.661616 |
| PCTUC_705 | 1.778648 | 2.980165 | 2.849719 | 2.00298 | 1.713915 |
| PCTUC_706 | 1.814586 | 2.2015 | 2.705321 | 1.909649 | 2.313449 |
| PCTUC_707 | 2.458768 | 5.149868 | 4.922929 | 4.477264 | 5.023233 |
| PCTUC_708 | 2.184737 | 2.946659 | 3.779886 | 2.632446 | 2.432719 |
| PCTUC_709 | 2.622874 | 4.778035 | 5.593929 | 4.240022 | 4.561161 |
| PCTUC_710 | 2.287708 | 4.084493 | 4.953694 | 3.663384 | 4.028213 |
| PCTUC_711 | 2.115186 | 2.804591 | 2.285582 | 2.297939 | 2.056486 |
| PCTUC_712 | 2.684022 | 2.781386 | 3.591925 | 2.617531 | 2.670167 |
| PCTUC_713 | 2.00528 | 3.891295 | 3.109384 | 2.850291 | 3.159817 |
| PCTUC_714 | 2.099078 | 2.875953 | 3.59224 | 2.31435 | 2.403818 |
| PCTUC_715 | 1.59096 | 4.816008 | 3.40176 | 4.762467 | 3.724533 |
| PCTUC_716 | 2.474753 | 5.810473 | 6.93972 | 6.273273 | 5.95307 |
| PCTUC_717 | 2.849058 | 4.082054 | 5.516239 | 4.204436 | 3.742789 |
| PCTUC_718 | 2.47499 | 3.832772 | 4.199984 | 4.278993 | 3.647059 |
| PCTUC_719 | 2.358 | 3.678965 | 4.428831 | 3.953455 | 3.784203 |
| PCTUC_720 | −1.205677 | −1.063135 | 1.223399 | 2.529553 | −1.518103 |
| PCTUC_721 | 1.219077 | 2.001222 | 2.165595 | −1.026659 | 1.008794 |
| PCTUC_722 | 1.96705 | 2.055324 | 1.437751 | −1.41294 | 1.360393 |
| PCTUC_723 | 2.562115 | 1.727666 | 2.153008 | 1.840006 | 1.938897 |
| PCTUC_724 | 1.682504 | 3.997535 | 6.661172 | 3.369624 | 7.058978 |
| PCTUC_725 | 3.101324 | 2.563077 | 3.681123 | 1.793499 | 1.51067 |
| PCTUC_726 | 1.67782 | 2.292115 | 1.848348 | −1.219312 | −1.166466 |
| PCTUC_727 | 3.559063 | 1.578317 | 1.594204 | 1.814655 | 1.531729 |
| PCTUC_728 | 2.806376 | 2.952748 | 4.708348 | 1.765438 | 1.495801 |
| PCTUC_729 | 2.330432 | 1.917511 | 3.005132 | 4.83178 | −1.258102 |
| PCTUC_730 | 1.080247 | 2.14124 | 2.324177 | 2.076872 | 3.588565 |
| PCTUC_731 | 1.015105 | 5.222567 | 2.830412 | 1.246106 | 2.175415 |
| PCTUC_732 | 1.851799 | 2.169836 | 1.784843 | 1.559113 | −1.25609 |
| PCTUC_733 | 1.904821 | 1.443 | 1.663835 | 2.115776 | 1.236191 |
| PCTUC_734 | 1.171522 | 2.305167 | 5.020079 | 3.221029 | 1.091173 |
| PCTUC_735 | 1.017259 | 1.672028 | 2.921675 | 1.218728 | 1.246331 |
| PCTUC_736 | 2.629588 | 1.524143 | 1.566741 | −1.201418 | −1.951975 |
| PCTUC_737 | 1.388693 | 1.779508 | 2.146775 | 1.104491 | −1.046858 |
| PCTUC_738 | 1.098163 | 2.774363 | 1.621336 | 1.516934 | 7.845816 |
| PCTUC_739 | 1.247938 | −1.26988 | −1.005211 | 1.587222 | −1.134634 |
| PCTUC_740 | 2.857754 | 1.181018 | 1.024162 | 1.563654 | −1.183276 |
| PCTUC_741 | 1.579953 | 1.597549 | 1.411438 | 1.444184 | 1.019456 |
| PCTUC_742 | 1.485681 | 1.734902 | 3.267958 | 1.198231 | −1.066429 |
| PCTUC_743 | 2.018359 | −1.174056 | 1.525324 | −1.349442 | −1.594422 |
| PCTUC_744 | 1.545292 | 2.761388 | 2.804563 | −1.050354 | −1.752185 |
| PCTUC_745 | 2.807861 | 1.011148 | 2.10842 | 1.66104 | 1.228528 |
| PCTUC_746 | −2.675976 | 1.970285 | 2.396611 | −2.847489 | 2.130628 |
| PCTUC_747 | −1.25556 | 2.387692 | 4.348555 | −1.255805 | 2.368414 |
| PCTUC_748 | 2.050708 | −2.072285 | −1.318467 | 1.513265 | 1.065084 |
| PCTUC_749 | 4.927153 | −1.143048 | 5.439857 | 3.837492 | −3.545734 |
| PCTUC_750 | 2.446485 | 1.367795 | 1.933932 | 1.386537 | 1.142848 |
| PCTUC_751 | 1.737975 | −1.241683 | 2.058157 | 1.067161 | −2.030771 |
| PCTUC_752 | 1.593348 | 4.761776 | 3.719502 | 1.503111 | 2.153079 |
| PCTUC_753 | 2.066443 | 1.033129 | 1.516422 | −1.335804 | −2.518059 |
| PCTUC_754 | 2.397538 | −1.066542 | 3.14355 | 2.478858 | −1.195199 |
| PCTUC_755 | 1.970024 | 1.185407 | 1.18702 | 1.219573 | −1.653884 |
| PCTUC_756 | 2.882849 | 2.101217 | 2.946557 | 1.692976 | −1.316299 |
| PCTUC_757 | 1.187444 | 1.511025 | 4.881807 | 5.212888 | 2.193957 |
| PCTUC_758 | 1.505924 | 1.555706 | 1.666933 | 2.959011 | 1.118693 |
| PCTUC_759 | 1.735673 | 1.381833 | 1.541585 | 1.737289 | −2.07133 |
| PCTUC_760 | 2.398042 | −1.407117 | 1.76619 | 2.031062 | −2.262535 |
| PCTUC_761 | 1.33241 | 1.004258 | 2.610148 | 1.57589 | −1.525089 |
| PCTUC_762 | 1.036089 | 3.905444 | 1.182394 | 3.137581 | 3.109285 |
| PCTUC_763 | 1.623725 | 1.003853 | 1.479892 | 1.332373 | −1.336425 |
| PCTUC_764 | 1.443503 | 1.122172 | 1.359252 | 1.011896 | −1.182106 |
| PCTUC_765 | 2.852201 | 3.815464 | 3.295881 | 3.430123 | 1.612201 |
| PCTUC_766 | 1.751701 | 1.370024 | 1.566602 | 1.051677 | −1.430663 |
| PCTUC_767 | 1.688487 | −1.026691 | 1.496795 | 1.156978 | −1.046688 |
| PCTUC_768 | 1.804999 | 1.775698 | 1.30813 | 1.117862 | 1.079834 |
| PCTUC_769 | 2.228969 | 2.045903 | 1.798744 | 1.413123 | −1.011207 |
| PCTUC_770 | 1.780768 | 2.462475 | 1.889457 | 1.767707 | −1.141445 |
| PCTUC_771 | 2.005732 | 1.116398 | 34.002872 | 1.488342 | 1.233248 |
| PCTUC_772 | 1.754995 | −1.437288 | 1.556602 | −1.705196 | −1.570951 |
| PCTUC_773 | 1.537386 | 2.238718 | 2.355336 | 1.640442 | 1.361949 |
| PCTUC_774 | 1.32997 | 3.654829 | 2.754861 | 2.30835 | 1.262997 |
| PCTUC_775 | 1.630996 | 2.98714 | 2.822254 | 2.15646 | 2.017799 |
| PCTUC_776 | 3.07617 | −2.487576 | 3.56929 | 2.108594 | −2.786735 |
| PCTUC_777 | 1.751589 | 1.397667 | 1.306645 | 1.239567 | −1.283668 |
| PCTUC_778 | 1.510138 | 1.526597 | 1.664457 | 1.440165 | −1.032099 |
| PCTUC_779 | 3.748428 | 1.452387 | 7.42728 | 4.553708 | −1.07404 |
| PCTUC_780 | 2.157646 | −1.205891 | 1.907031 | 1.53636 | −2.304723 |
| PCTUC_781 | 1.722384 | 1.527703 | 1.481272 | 1.215339 | −1.406521 |
| PCTUC_782 | 1.617926 | 1.552256 | 2.451002 | 1.04707 | 1.072533 |
| PCTUC_783 | 2.737198 | 2.23809 | 2.347927 | 1.955506 | −1.07352 |
| PCTUC_784 | 2.944778 | 1.815663 | 3.105924 | 1.291081 | −1.739954 |
| PCTUC_785 | 3.654921 | 2.573428 | 2.848108 | 1.267785 | 1.625115 |
| PCTUC_786 | 2.435968 | 4.543569 | 1.591059 | 3.410156 | 1.128185 |
| PCTUC_787 | 1.637091 | 3.55331 | 3.154013 | 1.750237 | 1.272859 |
| PCTUC_788 | 1.606908 | −1.181581 | 1.337417 | −2.098886 | −2.480899 |
| PCTUC_789 | 2.483153 | 1.444229 | 1.86178 | −1.248986 | −1.504003 |
| PCTUC_790 | 1.447673 | 1.045415 | 1.208749 | 2.23128 | 1.276644 |
| PCTUC_791 | 1.592721 | 1.349893 | 3.158833 | 1.447821 | 1.399047 |
| PCTUC_792 | 2.085161 | 2.20713 | 2.344924 | 2.470099 | 1.817712 |
| PCTUC_793 | 2.10013 | 1.513724 | 2.635218 | 2.137043 | 1.708771 |
| PCTUC_794 | 1.863609 | 2.198983 | 2.666669 | 1.811442 | 1.939686 |
| PCTUC_795 | 2.127643 | 2.492941 | 2.642769 | 2.282253 | 2.362006 |
| PCTUC_796 | 2.647675 | 2.326116 | 2.575455 | 1.61441 | 1.680482 |
| PCTUC_797 | 2.603868 | 2.269858 | 2.853786 | 2.478076 | 1.905879 |
| PCTUC_798 | 2.457634 | 2.696164 | 2.928414 | 2.720635 | 2.714809 |
| PCTUC_799 | 2.351586 | 2.502443 | 4.14609 | 3.89303 | 2.335182 |
| PCTUC_800 | 2.514232 | 3.562574 | 3.872903 | 3.111842 | 2.51209 |
| PCTUC_801 | 2.584845 | 2.455776 | 5.196043 | 3.88422 | 2.451636 |
| PCTUC_802 | 2.568384 | 2.687358 | 4.062475 | 4.073182 | 2.542692 |
| PCTUC_803 | 2.467542 | 2.698226 | 3.995141 | 3.278665 | 2.342741 |
| PCTUC_804 | 2.423423 | 1.384956 | 2.123258 | 1.957864 | 1.386133 |
| PCTUC_805 | 2.672317 | 1.401187 | 1.540846 | 1.152146 | −1.175308 |
| PCTUC_806 | 3.325083 | 2.04527 | 2.802911 | 2.473777 | 1.819835 |
| PCTUC_807 | 2.345594 | 1.253775 | 1.38732 | 3.626277 | 1.921228 |
| PCTUC_808 | 2.74287 | 3.69523 | 5.083086 | 4.782139 | 2.761177 |
| PCTUC_809 | 1.961826 | 2.048956 | 1.790611 | 3.117042 | 2.17878 |
| PCTUC_810 | 1.738072 | 1.312312 | 1.851987 | 1.688317 | 1.826226 |
| PCTUC_811 | 2.479734 | 2.148855 | 2.703484 | 2.424147 | 1.854368 |
| PCTUC_812 | 2.216486 | 1.603243 | 2.525568 | 2.223361 | 1.836276 |
| PCTUC_813 | 2.244768 | 1.638971 | 2.436859 | 2.326672 | 1.8383 |
| PCTUC_814 | 2.599626 | 3.107804 | 4.748261 | 3.481901 | 2.720379 |
| PCTUC_815 | 2.731606 | 2.866852 | 3.780127 | 2.582704 | 2.17795 |
| PCTUC_816 | 2.782779 | 2.519143 | 3.337878 | 3.713792 | 2.460799 |
| PCTUC_817 | 2.539845 | 1.612676 | 2.570179 | 1.924375 | 1.690343 |
| PCTUC_818 | 2.94142 | 2.551051 | 3.184934 | 2.801994 | 2.33619 |
| PCTUC_819 | 2.593287 | 3.521731 | 4.601146 | 3.217127 | 2.405624 |
| PCTUC_820 | 1.869347 | 1.156877 | 1.535996 | 1.159733 | 1.049716 |
| PCTUC_821 | 2.347548 | 1.943487 | 2.602382 | 1.883901 | 1.635784 |
| PCTUC_822 | 2.762829 | 3.264891 | 5.359295 | 4.502306 | 3.029265 |
| PCTUC_823 | 1.709181 | 1.903973 | 1.224162 | 2.378757 | 1.939935 |
| PCTUC_824 | 2.227166 | 1.707171 | 2.192069 | 1.810446 | 1.541394 |
| PCTUC_825 | 2.623839 | 1.395692 | 2.159526 | 1.437781 | 1.424438 |
| PCTUC_826 | 1.645178 | −1.212428 | 1.368683 | −1.04751 | −1.335886 |
| PCTUC_827 | 1.546281 | 1.382322 | 2.004729 | 1.195291 | 1.218382 |
| PCTUC_828 | 2.18352 | 1.813284 | 2.32015 | 1.509559 | 1.480408 |
| PCTUC_829 | 1.874654 | 1.125268 | 1.435859 | −1.304285 | −1.312731 |
| PCTUC_830 | 2.283218 | 1.781524 | 2.266755 | 1.943294 | 1.646191 |
| PCTUC_831 | 2.391593 | −1.009171 | 1.332706 | −1.261596 | −1.61064 |
| PCTUC_832 | 1.880277 | 1.458405 | 1.539495 | 1.278124 | 1.443973 |
| PCTUC_833 | 1.751907 | 1.79457 | 1.72199 | 1.301647 | 1.022377 |
| PCTUC_834 | 1.976311 | 1.460713 | 2.062928 | 1.372882 | 1.3302 |
| PCTUC_835 | 2.281342 | 2.204623 | 2.371787 | 2.323638 | 1.765945 |
| PCTUC_836 | 1.45514 | −1.0925 | 1.160709 | 1.031877 | −1.113493 |
| PCTUC_837 | 2.231949 | 1.66407 | 2.161517 | 1.429815 | 1.354722 |
| PCTUC_838 | 2.005671 | −2.169267 | −1.164172 | −1.842256 | −2.396542 |
| PCTUC_839 | 2.297453 | 2.766795 | 4.081153 | 2.158186 | 1.795967 |
| PCTUC_840 | 1.678983 | 1.204796 | 2.335048 | 1.335965 | 2.376273 |
| PCTUC_841 | 2.266033 | 2.716181 | 2.149279 | 1.463845 | 1.134204 |
| PCTUC_842 | 2.482376 | 1.619383 | 2.270337 | −1.229555 | −1.389874 |
| PCTUC_843 | 1.871004 | 1.006036 | 1.009794 | 1.274239 | −1.385184 |
| PCTUC_844 | 1.738249 | 1.103569 | 1.422457 | −1.057936 | −1.378921 |
| PCTUC_845 | 1.679917 | 1.342282 | 1.664368 | 2.089621 | 1.064222 |
| PCTUC_846 | 1.85247 | 1.315385 | 1.280974 | 1.452513 | −1.129171 |
| PCTUC_847 | 1.9447 | 1.183061 | 1.32463 | 1.112224 | −1.025501 |
| PCTUC_848 | 2.019166 | 2.091423 | 1.847378 | 3.154582 | 1.44493 |
| PCTUC_849 | 1.743695 | 1.90351 | 1.688092 | 1.963297 | 1.678683 |
| PCTUC_850 | 2.045105 | 1.648624 | 2.308564 | 1.954925 | 1.453773 |
| PCTUC_851 | 1.562211 | 1.136459 | 1.845817 | −1.086125 | −1.357593 |
| PCTUC_852 | 1.889697 | 1.312998 | 2.271817 | 1.761846 | −1.842876 |
| PCTUC_853 | 1.676356 | 1.374857 | 1.613049 | 2.606546 | 1.058314 |
| PCTUC_854 | 2.649884 | 2.259034 | 2.604694 | 2.801454 | 2.114191 |
| PCTUC_855 | 2.364338 | 1.62134 | 2.291844 | 1.883181 | 1.499188 |
| PCTUC_856 | 2.907776 | 2.257864 | 4.008818 | 3.392172 | 2.427414 |
| PCTUC_857 | 1.504321 | 1.376339 | 2.058645 | −1.784745 | 1.963081 |
| PCTUC_858 | 2.044061 | 2.004635 | 3.352611 | 2.537826 | 1.762131 |
| PCTUC_859 | 2.013783 | 1.536712 | 2.006352 | 1.351533 | 1.26096 |
| PCTUC_860 | 2.13201 | −1.115348 | 1.203492 | −1.029419 | −1.134879 |
| PCTUC_861 | 1.813424 | 1.637124 | 2.287569 | 2.369354 | 1.098582 |
| PCTUC_862 | 1.783912 | 1.357527 | 1.117161 | 1.014917 | −1.249444 |
| PCTUC_863 | 1.639549 | 1.782294 | 1.222373 | 1.319296 | −1.975291 |
| PCTUC_864 | 1.90779 | 1.773835 | 2.173387 | 1.771235 | 1.285498 |
| PCTUC_865 | 1.871908 | 1.736728 | 1.634273 | 2.278668 | 1.260973 |
| PCTUC_866 | 1.52375 | −1.07945 | 1.211952 | 1.089258 | −1.249161 |
| PCTUC_867 | 1.877495 | 1.917157 | 2.066668 | 2.591593 | 1.722827 |
| PCTUC_868 | 2.112046 | 2.219779 | 1.913224 | 1.858551 | 1.03877 |
| PCTUC_869 | 1.625932 | −1.098634 | 1.378695 | −1.768543 | −1.969913 |
| PCTUC_870 | 1.96413 | 1.421129 | 2.013952 | 1.004407 | −1.038988 |
| PCTUC_871 | 1.890775 | 1.185761 | 1.517475 | 1.007294 | −1.046279 |
| PCTUC_872 | 1.859905 | 1.622411 | 1.984478 | −1.119956 | −1.143552 |
| PCTUC_873 | 1.969205 | 2.159228 | 2.561842 | 1.304826 | −1.011093 |
| PCTUC_874 | 1.809296 | 3.093593 | 2.048956 | 2.165634 | 1.434358 |
| PCTUC_875 | 1.976093 | 1.667331 | 1.503174 | 1.410736 | 1.373617 |
| PCTUC_876 | 1.698732 | 1.905596 | 2.541518 | 1.739503 | −1.078499 |
| PCTUC_877 | 2.082926 | 1.377183 | 2.487029 | −1.016485 | −1.140493 |
| PCTUC_878 | 1.541651 | 1.458844 | 1.476125 | 1.730811 | 1.382746 |
| PCTUC_879 | 2.209875 | 1.955096 | 2.333605 | 2.3839 | 1.646064 |
| PCTUC_880 | 1.951771 | 1.6827 | 2.031071 | 1.627983 | 1.584582 |
| PCTUC_881 | 1.954496 | 2.04587 | 2.55217 | 2.220093 | 1.588366 |
| PCTUC_882 | 2.301353 | 1.994945 | 2.153584 | 2.236753 | 1.649811 |
| PCTUC_883 | 2.325608 | 2.589049 | 2.499343 | 2.33114 | 1.720812 |
| PCTUC_884 | 1.708056 | 1.789686 | 1.79987 | 1.421518 | −1.111179 |
| PCTUC_885 | 1.94465 | −1.539719 | −2.02752 | 1.242959 | −1.255616 |
| PCTUC_886 | 2.163645 | 2.68261 | 2.434486 | 1.358898 | 1.236363 |
| PCTUC_887 | 2.023344 | 1.535118 | 1.598191 | 1.46662 | 1.114935 |
| PCTUC_888 | 3.805361 | −1.069556 | 1.609747 | −1.07591 | −1.619559 |
| PCTUC_889 | 2.091429 | 1.468055 | 1.245638 | 1.022078 | −1.027285 |
| PCTUC_890 | 1.921732 | 1.48676 | 2.127379 | 1.295536 | 1.247707 |
| PCTUC_891 | 2.363246 | 1.666287 | 1.836035 | 2.044549 | 1.476581 |
| PCTUC_892 | 1.910954 | 1.459881 | 1.555845 | −1.049927 | −1.618603 |
| PCTUC_893 | 2.822666 | 2.622807 | 3.53729 | 1.375128 | 1.160408 |
| PCTUC_894 | 2.52524 | 2.373235 | 3.208908 | 2.510066 | 2.15306 |
| PCTUC_895 | 1.962498 | 1.407028 | 1.535472 | 1.424376 | 1.051004 |
| PCTUC_896 | 2.271611 | 1.191141 | 2.048356 | 1.421338 | 1.191054 |
| PCTUC_897 | 1.553053 | −1.974929 | −1.903705 | 1.486964 | 1.508478 |
| PCTUC_898 | 2.549773 | 3.184214 | 4.649253 | 2.011571 | 1.58673 |
| PCTUC_899 | 2.158757 | 2.411463 | 2.41099 | 1.354378 | 1.042022 |
| PCTUC_900 | 1.788992 | 2.553147 | 2.451661 | 1.704656 | 1.721045 |
| PCTUC_901 | 1.938191 | 1.050664 | 1.215151 | −1.046125 | 1.061172 |
| PCTUC_902 | 2.177013 | 1.063489 | 1.191732 | −1.36473 | −1.708799 |
| PCTUC_903 | 1.873974 | 1.978962 | 2.267684 | 1.318745 | 1.435156 |
| PCTUC_904 | 1.778571 | 1.686699 | 1.426102 | −1.205492 | −1.405787 |
| PCTUC_905 | 2.266052 | 1.302131 | 1.820607 | 1.647485 | 1.116222 |
| PCTUC_906 | 2.751729 | 2.016082 | 2.143599 | 1.745673 | 1.411276 |
| PCTUC_907 | 2.856837 | 4.284631 | 3.878442 | 3.326426 | 2.825075 |
| PCTUC_908 | 1.95905 | 1.64949 | 3.431271 | 2.31849 | 1.451118 |
| PCTUC_909 | 1.691228 | 1.255651 | 2.059265 | 1.018969 | −1.236387 |
| PCTUC_910 | 2.426663 | 1.193135 | 1.550878 | 1.26375 | −2.27989 |
| PCTUC_911 | 4.532208 | 2.238964 | 2.900606 | −2.700652 | −2.005532 |
| PCTUC_912 | 1.54193 | 1.019645 | −1.82718 | 2.099053 | −3.007764 |
| PCTUC_913 | 2.648759 | 1.394977 | 1.270218 | 1.774617 | 1.057235 |
| PCTUC_914 | 1.128493 | 2.531108 | 2.016811 | 3.008403 | 3.898096 |
| PCTUC_915 | 1.801934 | 2.191015 | 3.068439 | 1.352042 | 1.298424 |
| PCTUC_916 | 2.121188 | 1.570392 | 1.336953 | 1.167939 | −1.554178 |
| PCTUC_917 | 1.965218 | 1.922846 | 1.327187 | 1.025806 | −1.7507 |
| PCTUC_918 | 1.995978 | 1.821286 | 2.205084 | −1.13903 | −1.191393 |
| PCTUC_919 | 1.322658 | 2.104843 | 2.861712 | 1.681921 | 2.872681 |
| PCTUC_920 | 2.698585 | 1.970061 | 1.211588 | 3.268852 | 2.365577 |
| PCTUC_921 | 1.727702 | 1.722659 | 1.76901 | 1.971489 | 1.591412 |
| PCTUC_922 | 2.134946 | 2.808802 | 3.163258 | 1.398622 | 1.656875 |
| PCTUC_923 | 3.874743 | −1.967023 | 3.358653 | 1.087691 | 1.532369 |
| PCTUC_924 | 1.343629 | −1.03239 | −1.781882 | 2.09737 | −2.384392 |
| PCTUC_925 | 1.416624 | 1.590514 | 2.341637 | 1.477663 | 2.725187 |
| PCTUC_926 | 2.278423 | −1.304067 | 1.084692 | −1.079548 | −1.80759 |
| PCTUC_927 | −1.212027 | 1.171116 | 1.829475 | 1.941464 | 2.180511 |
| PCTUC_928 | 2.340422 | 1.355329 | 1.415694 | 1.08397 | −1.223843 |
| PCTUC_929 | 2.15377 | 1.618364 | 2.005306 | 1.092598 | −1.651047 |
| PCTUC_930 | 2.479362 | −1.213437 | 1.090769 | −1.149222 | −1.471385 |
| PCTUC_931 | 1.645102 | 2.155922 | 1.039858 | 1.343799 | 1.362534 |
| PCTUC_932 | 1.937046 | 1.845351 | 2.05657 | −1.258158 | −1.216066 |
| PCTUC_933 | 2.929791 | 1.407341 | 1.54831 | 1.010886 | −1.266786 |
| PCTUC_934 | 1.616478 | 1.237305 | 1.177842 | 1.013334 | −1.807534 |
| PCTUC_935 | 2.428755 | −1.44736 | 1.060927 | 1.645897 | −1.674838 |
| PCTUC_936 | 1.094927 | 5.459811 | 1.070757 | 3.521735 | 3.525177 |
| PCTUC_937 | 3.064947 | 1.020142 | 1.660377 | 1.513395 | −1.338045 |
| PCTUC_938 | 2.338089 | 1.109879 | 1.828194 | −1.334607 | −1.661552 |
| PCTUC_939 | 1.983513 | 2.87102 | 3.14574 | 1.457221 | 1.217682 |
| PCTUC_940 | 2.83538 | 1.388755 | 1.554512 | −1.103216 | −1.020415 |
| PCTUC_941 | 3.385786 | 3.089068 | 2.907079 | 1.402766 | 2.203065 |
| PCTUC_942 | −1.412977 | −1.811306 | 1.675567 | 1.103626 | 3.157614 |
| PCTUC_943 | 3.666498 | 1.075061 | 1.531565 | 1.111984 | −1.632703 |
| PCTUC_944 | 1.843041 | 2.498397 | 1.6392 | 1.850137 | 1.347077 |
| PCTUC_945 | 1.522345 | 1.550846 | 1.137903 | 1.755582 | 1.180404 |
| PCTUC_946 | 3.172343 | −1.24995 | 1.939802 | 1.777056 | −1.791084 |
| PCTUC_947 | 2.288532 | 1.312973 | 1.379707 | 1.309444 | −1.475509 |
| PCTUC_948 | −1.124776 | 2.213994 | 4.330243 | −1.445415 | 2.07831 |
| PCTUC_949 | 3.346842 | −1.188788 | 1.263286 | 1.919915 | −1.14363 |
| PCTUC_950 | 5.91396 | 2.479738 | 8.393818 | 6.084914 | 4.093964 |
| PCTUC_951 | 1.871348 | 2.61188 | 1.729258 | 1.833634 | 1.36509 |
| PCTUC_952 | 2.036369 | 1.827873 | 1.442905 | 2.043129 | 1.025536 |
| PCTUC_953 | 3.07094 | 2.967804 | 2.867549 | 3.798386 | 2.524811 |
| PCTUC_954 | 3.129348 | 1.128209 | 1.538464 | 1.22886 | −1.176202 |
| PCTUC_955 | 2.363069 | 2.394411 | 2.180458 | −1.101003 | −1.863439 |
| PCTUC_956 | 4.62408 | 1.552741 | 2.699866 | 1.611055 | 1.67697 |
| PCTUC_957 | 1.703468 | 1.262165 | 1.267325 | −1.487167 | |
| PCTUC_958 | 2.874749 | 9.091537 | 2.579849 | 2.25185 | −1.038772 |
| PCTUC_959 | 2.090051 | 1.305155 | 1.579253 | 1.503822 | −1.386404 |
| PCTUC_960 | 2.845635 | 1.507949 | 1.179313 | 1.183302 | −1.464932 |
| PCTUC_961 | 1.530236 | 3.29414 | 2.872372 | 1.096841 | 1.829785 |
| PCTUC_962 | 2.019459 | 1.862188 | 1.227619 | 1.190924 | −1.438797 |
| PCTUC_963 | 2.151981 | 1.134676 | 1.309617 | 1.415813 | −1.234398 |
| PCTUC_964 | 2.46002 | 1.865439 | 2.370393 | −1.09332 | −3.343158 |
| PCTUC_965 | 2.357135 | 1.837095 | 1.809527 | 1.743313 | −1.162524 |
| PCTUC_966 | 2.646736 | −1.230297 | 16.329386 | −1.143001 | −1.221426 |
| PCTUC_967 | 2.171907 | 1.72484 | 1.534128 | 1.603964 | 1.367996 |
| PCTUC_968 | 4.739057 | 1.944878 | 2.618026 | −1.846025 | −2.014114 |
| PCTUC_969 | 1.907598 | 1.905547 | 1.442495 | 1.500899 | 1.457679 |
| PCTUC_970 | 3.316134 | 2.077369 | 1.906654 | 2.141966 | −1.005555 |
| PCTUC_971 | 2.386012 | 1.093453 | 1.315324 | 1.454897 | −1.284141 |
| PCTUC_972 | 3.227783 | −1.009619 | 1.343919 | −1.032079 | −1.399772 |
| PCTUC_973 | 1.251395 | 1.961825 | 2.074857 | −1.041606 | −1.257309 |
| PCTUC_974 | 2.587815 | 1.378796 | 1.798498 | 1.758659 | 1.092618 |
| PCTUC_975 | 1.943511 | 2.282181 | 2.703775 | 1.038239 | −1.779081 |
| PCTUC_976 | 1.623674 | 1.062539 | 1.261934 | 1.465839 | 1.609397 |
| PCTUC_977 | 4.600121 | −1.597071 | 3.386886 | 1.982753 | −5.036413 |
| PCTUC_978 | 5.154942 | −1.644976 | 3.034494 | 1.65744 | −1.747205 |
| PCTUC_979 | 1.716536 | −1.087847 | 1.360934 | 2.241092 | 1.105519 |
| PCTUC_980 | 2.386343 | 1.795594 | 1.492045 | 1.670228 | −1.506544 |
| PCTUC_981 | 1.674169 | 1.624496 | 1.309471 | 2.548435 | −1.017204 |
| PCTUC_982 | 1.818088 | 2.996705 | 5.079009 | 3.42635 | 8.203172 |
| PCTUC_983 | 2.53358 | 1.54159 | 1.62574 | 1.1435 | −2.666574 |
| PCTUC_984 | 2.02023 | 1.97024 | −1.190315 | 1.653198 | −1.202102 |
| PCTUC_985 | 4.662121 | 1.90137 | 2.882533 | 1.816393 | 3.0195 |
| PCTUC_986 | 8.491511 | 4.16046 | 8.290752 | 9.11205 | 1.558066 |
| PCTUC_987 | 1.509953 | 1.227295 | 1.284975 | 2.07757 | 1.044685 |
| PCTUC_988 | 2.254812 | 1.719378 | 1.654111 | 1.818505 | −1.854655 |
| PCTUC_989 | 2.697165 | 1.935913 | −1.211672 | −1.055024 | −1.235915 |
| PCTUC_990 | 1.922588 | −1.141932 | 1.454403 | −1.655129 | −1.738252 |
| PCTUC_991 | 4.337499 | −2.529357 | 3.53756 | 1.902414 | −5.891994 |
| PCTUC_992 | 5.608949 | 2.492292 | 1.717627 | 1.557444 | 1.716952 |
| PCTUC_993 | 1.986168 | 2.308209 | 5.121046 | −1.67648 | −2.187591 |
| PCTUC_994 | 5.024633 | 2.315602 | 2.597577 | −1.086497 | 1.236312 |
| PCTUC_995 | 2.535233 | 1.611994 | 1.390142 | 1.288071 | −1.528931 |
| PCTUC_996 | 1.28686 | 2.158292 | 2.788701 | 2.345606 | 5.569685 |
| PCTUC_997 | 2.178464 | −1.029413 | 1.827458 | 1.145476 | −1.355086 |
| PCTUC_998 | 1.976933 | 1.262073 | 1.608358 | 1.431333 | −1.122224 |
| PCTUC_999 | 1.493959 | 1.989163 | 1.052016 | 1.194044 | −1.147475 |
| PCTUC_1000 | 2.20571 | 1.6934 | 1.670557 | 1.617663 | −1.023672 |
| PCTUC_1001 | 1.130081 | 2.155692 | 3.082375 | 2.100547 | −1.204434 |
| PCTUC_1002 | 2.096987 | −1.294777 | 1.078077 | −1.129435 | −1.530266 |
| PCTUC_1003 | 1.4735 | 2.15687 | 1.821478 | 1.463017 | 1.283592 |
| PCTUC_1004 | 3.601119 | −1.07069 | 1.343604 | −1.143005 | −2.140174 |
| PCTUC_1005 | 2.16352 | 1.304812 | 1.170797 | −1.375762 | −2.103141 |
| PCTUC_1006 | 9.251185 | 1.590991 | 5.711594 | 4.310499 | −1.261379 |
| PCTUC_1007 | 2.718569 | 1.268528 | 2.513555 | −1.982436 | −1.091678 |
| PCTUC_1008 | 1.276398 | 1.204101 | 1.638292 | 4.717824 | 3.206786 |
| PCTUC_1009 | 1.652535 | 1.975113 | 2.175845 | −1.12018 | −1.256014 |
| PCTUC_1010 | 2.162597 | 1.310228 | 1.180317 | 1.430186 | 1.023308 |
| PCTUC_1011 | 2.407776 | 1.636206 | 1.314562 | 1.337553 | −1.441501 |
| PCTUC_1012 | 4.84285 | 2.186353 | 2.722289 | −1.262478 | −1.152552 |
| PCTUC_1013 | 2.04709 | 1.407198 | 1.560425 | 1.47126 | 1.312585 |
| PCTUC_1014 | 6.928616 | 1.055858 | 1.73243 | 2.155555 | 1.436217 |
| PCTUC_1015 | 1.976716 | 1.164299 | 1.108067 | 1.452288 | −1.039557 |
| PCTUC_1016 | 1.382746 | 1.236182 | 2.766599 | 3.571078 | 2.098697 |
| PCTUC_1017 | 2.340813 | 1.321283 | 1.651027 | −1.085383 | −1.248735 |
| PCTUC_1018 | 1.948146 | 1.027787 | 1.058867 | 1.177399 | −1.100196 |
| PCTUC_1019 | 2.038241 | 1.053319 | 1.24096 | 1.37697 | 1.005457 |
| PCTUC_1020 | 2.229994 | 1.313133 | 1.350871 | 1.360874 | −1.033352 |
| PCTUC_1021 | 3.197343 | 2.049208 | 1.526544 | 1.221605 | −1.309624 |
| PCTUC_1022 | 1.934023 | 1.118641 | 1.445595 | 1.440211 | −1.104546 |
| PCTUC_1023 | 2.286244 | 1.199824 | 1.239642 | 1.410419 | −1.164296 |
| PCTUC_1024 | 2.001559 | 1.172226 | 1.705722 | −1.206812 | −1.054981 |
| PCTUC_1025 | 2.404986 | 1.106891 | 1.008177 | −1.131864 | −1.427144 |
| PCTUC_1026 | 2.11835 | −1.035554 | 1.054889 | 1.15996 | −1.218929 |
| PCTUC_1027 | 2.190092 | 1.41212 | 1.34154 | 1.687925 | −1.292349 |
| PCTUC_1028 | 3.870844 | −1.713348 | 3.093784 | 1.692219 | −7.325786 |
| PCTUC_1029 | 2.591095 | 1.170344 | 1.749711 | 1.783676 | −1.138249 |
| PCTUC_1030 | 2.480039 | 1.690515 | 1.771112 | 1.444623 | −1.221338 |
| PCTUC_1031 | 2.688212 | 1.639698 | 1.950274 | 1.999945 | 1.067321 |
| PCTUC_1032 | 8.662786 | 1.111851 | 1.969947 | 1.904457 | 1.343916 |
| PCTUC_1033 | 2.168242 | 1.83769 | −1.03914 | 1.615783 | 1.27235 |
| PCTUC_1034 | 2.150622 | 1.288981 | 1.17577 | 1.315346 | −1.072515 |
| PCTUC_1035 | 1.867998 | 1.425122 | 1.339841 | 1.516976 | −1.286181 |
| PCTUC_1036 | 3.322184 | 1.418265 | 1.509088 | 2.627051 | 1.135941 |
| PCTUC_1037 | 1.914963 | 1.260587 | 1.324501 | 1.198238 | −1.551652 |
| PCTUC_1038 | 2.619273 | 2.006016 | −1.109492 | 1.349718 | 1.086261 |
| PCTUC_1039 | 2.990175 | 1.283478 | 1.915295 | 1.754567 | −1.138346 |
| PCTUC_1040 | 2.314548 | 1.527413 | 1.683415 | 1.129444 | −1.559905 |
| PCTUC_1041 | 2.059229 | 1.561613 | 1.930949 | 1.902644 | −1.386571 |
| PCTUC_1042 | 3.089431 | 1.932695 | 3.129811 | 1.719934 | −1.320877 |
| PCTUC_1043 | 2.218593 | 2.379896 | 2.101869 | 1.637499 | 1.196839 |
| PCTUC_1044 | 3.22484 | 1.934236 | 2.257307 | 2.405261 | 1.09738 |
| PCTUC_1045 | 2.879969 | 1.782096 | 1.488046 | 1.917997 | 1.11014 |
| PCTUC_1046 | 2.405005 | 1.380251 | 1.708364 | 2.180275 | 1.085321 |
| PCTUC_1047 | 2.321114 | 3.516298 | 4.373227 | 3.01992 | 4.139297 |
| PCTUC_1048 | 2.195277 | 3.486061 | 5.021372 | 2.803599 | 4.429878 |
| PCTUC_1049 | 2.188752 | 2.981335 | 3.233166 | 1.950319 | 3.128412 |
| PCTUC_1050 | 1.613317 | 1.971067 | 2.743932 | 1.618722 | 2.855495 |
| PCTUC_1051 | 2.123477 | 1.513347 | 1.615171 | −1.039459 | 1.834816 |
| PCTUC_1052 | 1.744405 | 2.047574 | 2.076573 | 1.551619 | 1.922986 |
| PCTUC_1053 | 2.097268 | 3.603894 | 3.217664 | 2.832975 | 3.028847 |
| PCTUC_1054 | 2.507241 | 2.729321 | 3.044449 | 3.602959 | 2.788986 |
| PCTUC_1055 | 2.402552 | 1.661436 | 2.673273 | 1.955399 | 2.420513 |
| PCTUC_1056 | 2.051499 | 3.139189 | 3.432348 | 2.196797 | 2.255609 |
| PCTUC_1057 | 2.215758 | 2.988161 | 3.701127 | 2.786364 | 3.401309 |
| PCTUC_1058 | 2.13731 | 1.384542 | 2.027797 | 1.059753 | 2.095294 |
| PCTUC_1059 | 1.343765 | 2.219798 | 2.697312 | 2.333196 | 3.102681 |
| PCTUC_1060 | 2.088285 | 2.860373 | 3.085011 | 2.016002 | 3.103222 |
| PCTUC_1061 | 2.242374 | 2.994492 | 2.948725 | 2.4391886 | 3.150199 |
| PCTUC_1062 | 1.60416 | 1.591494 | 2.034929 | 1.556863 | 2.421872 |
| PCTUC_1063 | 1.987271 | 1.375089 | 1.998077 | 2.016782 | 1.889572 |
| PCTUC_1064 | 2.755367 | 4.411705 | 5.011181 | 3.46172 | 5.131229 |
| PCTUC_1065 | 1.490694 | 2.590107 | 2.38876 | 2.363459 | 4.526927 |
| PCTUC_1066 | 1.794536 | 1.984237 | 2.119993 | 1.470474 | 2.544308 |
| PCTUC_1067 | 2.013362 | 4.187653 | 3.594945 | 3.306826 | 4.448132 |
| PCTUC_1068 | 1.308447 | 2.572794 | 2.035954 | 1.168742 | −1.62542 |
| PCTUC_1069 | 2.068573 | 2.871417 | 4.054071 | 2.894181 | 4.689563 |
| PCTUC_1070 | 2.119418 | 2.070433 | 2.04862 | 1.577364 | 2.154318 |
| PCTUC_1071 | 1.388731 | 3.577526 | 3.684772 | 1.714653 | 3.6624 |
| PCTUC_1072 | 2.028962 | 2.494959 | 2.520422 | 1.52116 | 2.786445 |
| PCTUC_1073 | 1.354737 | 5.133123 | 5.65145 | −1.088542 | 2.657814 |
| PCTUC_1074 | 1.538652 | −2.114757 | −1.878364 | 1.578808 | 1.499023 |
| PCTUC_1075 | 5.673028 | 1.487911 | 3.36078 | 1.996255 | −1.226855 |
| PCTUC_1076 | 1.079724 | −1.086661 | 1.298582 | −2.48976 | −1.297809 |
| PCTUC_1077 | 3.755108 | −1.717643 | 3.507391 | 2.243764 | −6.207491 |
| PCTUC_1078 | 2.035899 | −1.0433 | 3.818222 | 1.377906 | −1.549799 |
| PCTUC_1079 | 1.837077 | 1.661645 | 3.01799 | −1.788427 | −1.698747 |
| PCTUC_1080 | 1.44747 | 1.984165 | 2.345122 | 1.636858 | 1.950357 |
| PCTUC_1081 | 2.589691 | 5.375653 | 6.566166 | 5.535592 | 6.460448 |
| PCTUC_1082 | 5.148818 | 1.46638 | 4.037243 | 3.383032 | 2.662901 |
| PCTUC_1083 | 1.742403 | 2.213345 | 3.029419 | 1.749504 | 1.541367 |
| PCTUC_1084 | 5.43197 | 2.509498 | 1.651137 | 2.294021 | 2.377209 |
| PCTUC_1085 | 1.892009 | 2.399117 | 2.119305 | 1.629489 | 2.086697 |
| PCTUC_1086 | 5.73202 | −1.514249 | 5.886267 | 2.988024 | −5.816788 |
| PCTUC_1087 | 2.234142 | −1.571367 | 1.514389 | 1.084099 | −1.197264 |
| PCTUC_1088 | 1.200861 | −1.078458 | 1.518761 | 1.225581 | −1.545213 |
| PCTUC_1089 | 1.151515 | 1.412061 | 2.449138 | 2.136675 | 2.094553 |
| PCTUC_1090 | 4.012289 | −1.088193 | 3.326313 | 1.816009 | −1.895476 |
| PCTUC_1091 | −1.468186 | 2.400961 | 3.376961 | −1.036417 | 2.125376 |
| PCTUC_1092 | 1.86228 | 1.19823 | 2.141057 | 2.600541 | −1.064478 |
| PCTUC_1093 | 2.556667 | 2.182766 | 2.833895 | 2.716894 | 1.994166 |
| PCTUC_1094 | 1.917973 | 1.256288 | 1.742476 | 1.373519 | −1.040928 |
| PCTUC_1095 | 2.621555 | 2.247114 | 3.160852 | 1.67503 | 3.055504 |
| PCTUC_1096 | 2.855342 | 3.209525 | 3.223669 | 2.431496 | 1.144113 |
| PCTUC_1097 | 1.188027 | 7.007524 | 2.897435 | 4.072117 | 3.561213 |
| PCTUC_1098 | 2.235905 | 3.822684 | 3.685224 | 2.116626 | 1.788512 |
| PCTUC_1099 | 1.330936 | 1.352804 | 1.032184 | 1.913205 | 1.142619 |
| PCTUC_1100 | 3.01892 | 3.443123 | 4.852659 | 3.883996 | −1.016162 |
| PCTUC_1101 | 1.497275 | −1.124809 | 1.461785 | −1.018584 | −1.077507 |
| PCTUC_1102 | 1.789655 | 3.265229 | 4.170906 | 3.68111 | 3.87418 |
| PCTUC_1103 | 3.608782 | 5.252712 | 8.523944 | 3.121104 | 4.45085 |
| PCTUC_1104 | 2.588284 | 1.178718 | 1.538689 | −1.197036 | −1.466973 |
| PCTUC_1105 | 1.527503 | 1.550702 | 1.517095 | 3.307125 | −1.187629 |
| PCTUC_1106 | 1.770228 | 1.134965 | 1.313179 | 2.075559 | −1.295864 |
| PCTUC_1107 | 1.523458 | 2.687189 | 2.26406 | 2.135197 | 2.66312 |
| PCTUC_1108 | 2.183624 | 2.147157 | 2.902527 | −1.371394 | 1.466713 |
| PCTUC_1109 | 2.225928 | 2.196385 | 2.044623 | 2.626373 | 2.64584 |
| PCTUC_1110 | 1.354471 | 1.193941 | 1.553985 | 1.463523 | −1.03174 |
| PCTUC_1111 | 1.685433 | 2.241103 | 1.567154 | −1.032259 | −1.041822 |
| PCTUC_1112 | 2.082848 | 1.4844 | 2.695112 | 1.403345 | −1.788018 |
| PCTUC_1113 | 2.861085 | 1.342187 | 4.543931 | 4.665126 | 3.338884 |
| PCTUC_1114 | 1.582655 | 2.503864 | 4.677818 | 2.280037 | 7.309894 |
| PCTUC_1115 | 1.654223 | 1.319917 | 1.579363 | 1.971646 | −1.049361 |
| PCTUC_1116 | 1.374163 | 2.717865 | 2.334999 | 1.905592 | 2.724711 |
| PCTUC_1117 | 2.810961 | 2.866595 | 9.361756 | −1.230064 | 2.835042 |
| PCTUC_1118 | 2.992826 | 2.338832 | 2.094304 | 1.685008 | 2.157194 |
| PCTUC_1119 | 1.330389 | 1.214922 | 1.499869 | 1.134647 | 1.376153 |
| PCTUC_1120 | 1.943912 | 1.350693 | 1.483964 | −1.036967 | 1.453104 |

[0673] TABLE 4

| | Colon | Colon | Colon | Colon | Colon |
|---|---|---|---|---|---|
| Internal Id | Tumor 1 | Tumor 2 | Tumor 3 | Tumor 4 | Tumor 5 |
| PCTDC_1 | −3.686332 | −3.764107 | −2.186606 | −3.680799 | −3.84198 |
| PCTDC_2 | −1.77226 | −1.420686 | −1.947258 | −2.290254 | −1.328009 |
| PCTDC_3 | −2.830777 | −2.188274 | −2.38472 | −2.302896 | −2.112362 |
| PCTDC_4 | −1.323522 | −2.135768 | −1.45575 | −1.914081 | 1.438666 |
| PCTDC_5 | −2.235407 | −1.80509 | −2.016836 | −2.171651 | −1.418959 |
| PCTDC_6 | −2.667534 | −1.160172 | −2.10837 | −1.32617 | −2.153253 |
| PCTDC_7 | 1.021256 | −25.105358 | 1.439239 | −7.869633 | −1.171115 |
| PCTDC_8 | −2.234816 | −1.242266 | −1.243916 | −1.636976 | −1.064982 |
| PCTDC_9 | −16.672455 | −36.952839 | −14.68694 | −31.487497 | −32.52441 |
| PCTDC_10 | −1.434666 | −1.613476 | −2.514822 | −2.946794 | −2.143325 |
| PCTDC_11 | −9.385355 | −4.410996 | −4.533406 | −13.051781 | −9.788757 |
| PCTDC_12 | −3.030862 | 1.265934 | −2.241221 | 1.405932 | −2.084695 |
| PCTDC_13 | −5.984219 | −3.497875 | −3.012388 | −5.099751 | −4.836649 |
| PCTDC_14 | −1.413376 | −1.002366 | 1.268685 | 1.365882 | −1.425659 |
| PCTDC_15 | −2.996104 | −1.091542 | −1.403562 | −1.430543 | −2.256678 |
| PCTDC_16 | −2.943326 | −2.249868 | −2.035691 | −1.535672 | −1.933099 |
| PCTDC_17 | −1.54203 | −2.192574 | −2.076071 | −1.693325 | −1.265747 |
| PCTDC_18 | −2.54153 | −1.691014 | −1.825847 | −2.509501 | −2.54944 |
| PCTDC_19 | −2.096784 | −2.959664 | −1.619618 | −1.55181 | −1.288303 |
| PCTDC_20 | −4.713184 | −2.644333 | −2.191245 | −3.963356 | −7.454573 |
| PCTDC_21 | −2.334953 | 1.145789 | −1.030932 | −2.206662 | −2.146682 |
| PCTDC_22 | 1.237133 | 2.211828 | −1.071583 | 1.450114 | −2.12071 |
| PCTDC_23 | −7.005491 | −9.202102 | −4.653239 | −6.05403 | −13.13538 |
| PCTDC_24 | −5.951272 | −3.290831 | −3.232419 | −4.298961 | −4.875925 |
| PCTDC_25 | −2.081615 | −6.085269 | −1.765094 | −2.220059 | 1.845746 |
| PCTDC_26 | −2.293379 | −1.050853 | −1.285113 | −1.328853 | −1.934643 |
| PCTDC_27 | −2.839561 | 1.611821 | −2.185083 | −5.724341 | −1.866924 |
| PCTDC_28 | −1.563559 | −1.277798 | −1.635946 | −1.273865 | −1.36657 |
| PCTDC_29 | 1.078378 | 1.039777 | −1.32094 | 1.030855 | −1.184824 |
| PCTDC_30 | −1.29269 | −1.946759 | −2.059295 | −2.439818 | −1.469364 |
| PCTDC_31 | −1.012831 | −1.271201 | −1.522388 | −1.413658 | −1.035629 |
| PCTDC_32 | −1.400573 | −2.489946 | −2.067323 | −2.041809 | −2.21355 |
| PCTDC_33 | −1.792293 | −1.204384 | −1.955245 | −2.213695 | −1.2927 |
| PCTDC_34 | −9.176607 | −4.869056 | −4.837561 | −9.30142 | −6.392067 |
| PCTDC_35 | −1.325917 | −1.476112 | −1.903347 | −1.844246 | −1.166259 |
| PCTDC_36 | −2.577685 | −2.057103 | −2.070463 | −2.040741 | −2.200454 |
| PCTDC_37 | −6.387117 | −3.830329 | −3.541164 | −5.297482 | −5.487053 |
| PCTDC_38 | −1.808332 | −1.838845 | −1.399662 | −1.668483 | −2.744579 |
| PCTDC_39 | −2.020502 | −1.953096 | −2.389464 | −2.185357 | −1.589978 |
| PCTDC_40 | −2.345016 | −1.103264 | −1.3714 | −2.098808 | −1.36887 |
| PCTDC_41 | −1.30085 | −1.293364 | −2.020555 | −1.683774 | −1.218266 |
| PCTDC_42 | −6.69437 | −3.298533 | −3.746257 | −6.221455 | −5.266223 |
| PCTDC_43 | −2.282477 | −2.061087 | −2.344448 | −2.35339 | −1.983304 |
| PCTDC_44 | −2.485822 | −1.833041 | −2.228038 | −2.318379 | −1.774187 |
| PCTDC_45 | −2.598734 | −1.185102 | −2.771417 | −3.295656 | −2.129327 |
| PCTDC_46 | −6.373006 | −9.560293 | −2.788558 | −3.045106 | −6.789342 |
| PCTDC_47 | −4.87862 | −2.657794 | −2.552702 | −4.304638 | −4.328265 |
| PCTDC_48 | −1.898269 | −1.156685 | −1.726415 | −1.402836 | −1.626888 |
| PCTDC_49 | −1.255479 | 1.182284 | −1.860565 | −1.56444 | −2.199043 |
| PCTDC_50 | −1.2934993 | −5.623239 | −5.310431 | −13.596727 | −12.429982 |
| PCTDC_51 | −5.198398 | −4.477626 | −4.28704 | −4.892914 | −3.817191 |
| PCTDC_52 | −2.349524 | −1.820608 | −2.454295 | −2.495358 | −2.524858 |
| PCTDC_53 | −1.195486 | −1.319256 | −1.530677 | −1.392 | −1.095178 |
| PCTDC_54 | −1.265201 | −1.569405 | −2.220051 | −2.484167 | −1.76688 |
| PCTDC_55 | −1.88841 | −5.731989 | −2.436103 | −3.851297 | −3.033818 |
| PCTDC_56 | −6.924843 | −4.498032 | −4.446744 | −6.123724 | −5.885492 |
| PCTDC_57 | −1.721724 | −5.243209 | −2.373629 | −3.036423 | −3.06899 |
| PCTDC_58 | −1.942217 | −2.25106 | −2.107988 | −1.765252 | −1.959601 |
| PCTDC_59 | −2.031986 | 2.064397 | −1.413948 | −1.241656 | −1.031326 |
| PCTDC_60 | −7.579762 | −4.952477 | −5.026139 | −8.268243 | −6.976716 |
| PCTDC_61 | −1.848968 | −1.066639 | −1.398534 | −1.855107 | −1.062309 |
| PCTDC_62 | −2.240544 | −1.273063 | −2.48321 | −1.429924 | −1.609147 |
| PCTDC_63 | −2.854465 | −2.842449 | −3.035436 | −2.914622 | 1.10521 |
| PCTDC_64 | −3.893095 | −2.440034 | −1.984535 | −3.534865 | −4.673214 |
| PCTDC_65 | −1.732418 | −1.829374 | −1.810178 | −2.663752 | −1.023093 |
| PCTDC_66 | −2.16481 | −1.621258 | −1.986666 | −1.997742 | −1.548889 |
| PCTDC_67 | −1.901971 | −1.24001 | −1.747679 | −1.402124 | −1.510826 |
| PCTDC_68 | −2.217162 | −1.195414 | −1.493331 | −1.936626 | −1.071265 |
| PCTDC_69 | −1.245448 | −1.448996 | −1.999391 | −1.5595 | −1.106344 |
| PCTDC_70 | −1.998234 | −2.018207 | −2.033922 | −1.801316 | −1.697051 |
| PCTDC_71 | −1.511911 | −1.458437 | −1.272488 | −1.458376 | −2.154458 |
| PCTDC_72 | −1.203158 | −2.797158 | −1.235114 | 1.005051 | 1.023688 |
| PCTDC_73 | −1.541916 | −1.903445 | −1.544858 | −2.257688 | −1.289162 |
| PCTDC_74 | −4.853553 | −3.635271 | −5.199815 | −6.211979 | −5.240062 |
| PCTDC_75 | −3.273766 | −14.657293 | −2.862239 | −1.764461 | −1.760385 |
| PCTDC_76 | −1.217171 | −1.296736 | −1.144786 | 1.079204 | −1.260905 |
| PCTDC_77 | −1.797696 | 1.103401 | −1.335014 | −2.339793 | −1.511612 |
| PCTDC_78 | −2.456534 | −1.875372 | −2.855611 | −2.716163 | −2.373691 |
| PCTDC_79 | −2.525538 | −2.232876 | −3.110879 | −3.264385 | −3.456531 |
| PCTDC_80 | −1.630138 | −1.35257 | −1.631509 | −1.196468 | −4.494679 |
| PCTDC_81 | −1.929872 | −1.113005 | 1.031929 | 1.007586 | −2.347475 |
| PCTDC_82 | −1.70836 | −1.282488 | −1.783215 | −1.979933 | −1.949185 |
| PCTDC_83 | −1.243828 | −1.987254 | −1.764672 | −2.130092 | −1.901367 |
| PCTDC_84 | 1.232643 | −2.07259 | −1.662058 | −1.68123 | −1.850402 |
| PCTDC_85 | −3.765696 | −3.829437 | −3.300366 | −1.734307 | −2.509329 |
| PCTDC_86 | −6.189479 | −3.353586 | −3.170256 | −5.04737 | −5.663467 |
| PCTDC_87 | −2.475857 | −3.51374 | −2.164196 | −1.447658 | −2.618937 |
| PCTDC_88 | 1.944102 | −1.259746 | −3.338257 | 1.38276 | −1.214961 |
| PCTDC_89 | −5.932095 | −3.275715 | −2.963247 | −5.379752 | −6.126326 |
| PCTDC_90 | −4.716655 | −5.929635 | −3.482047 | −3.96486 | −6.801842 |
| PCTDC_91 | −4.519485 | −5.358361 | −3.661997 | −4.073708 | −6.157125 |
| PCTDC_92 | −1.685087 | −1.691207 | −1.860737 | −1.845194 | −1.751631 |
| PCTDC_93 | −1.492022 | −1.006958 | −1.228877 | −1.906211 | −1.943167 |
| PCTDC_94 | 1.237337 | −1.164018 | −1.261906 | −1.155859 | 1.205331 |
| PCTDC_95 | −2.12835 | −2.041079 | −1.984469 | −2.045971 | −1.898901 |
| PCTDC_96 | −2.078055 | −2.330517 | −1.327108 | −1.441385 | −3.743099 |
| PCTDC_97 | −1.334297 | −2.087266 | −2.462863 | −1.61449 | −1.632635 |
| PCTDC_98 | −2.000543 | −1.611817 | −1.535503 | −1.859716 | −2.520927 |
| PCTDC_99 | −3.419719 | −1.580899 | −2.110636 | −3.050031 | −3.421836 |
| PCTDC_100 | −2.379466 | −1.420795 | −1.926739 | −2.998748 | −2.869548 |
| PCTDC_101 | −2.000934 | −1.77734 | −1.552652 | −2.221759 | −2.488121 |
| PCTDC_102 | −3.985031 | −5.559905 | −3.089806 | −5.037643 | −9.124702 |
| PCTDC_103 | −1.916361 | −1.481127 | −1.837724 | −2.897688 | −1.658977 |
| PCTDC_104 | −2.531153 | −2.705933 | −2.725935 | −3.236739 | −2.795705 |
| PCTDC_105 | 1.216257 | −1.641811 | −1.067287 | 1.311882 | 1.061105 |
| PCTDC_106 | −2.073981 | −1.348887 | −1.531421 | −1.910613 | −2.255851 |
| PCTDC_107 | −2.031476 | −1.595985 | −1.77897 | −1.50754 | −2.122092 |
| PCTDC_108 | −2.335722 | −2.427527 | −2.178308 | −2.322503 | −3.071886 |
| PCTDC_109 | −1.91579 | 1.12028 | −1.746202 | −3.056107 | −3.911528 |
| PCTDC_110 | −11.250849 | −5.493386 | −5.459946 | −6.066711 | −7.821973 |
| PCTDC_111 | −4.779661 | −2.762719 | −2.382575 | −4.451578 | −4.830759 |
| PCTDC_112 | −4.049462 | −5.77829 | −3.279663 | −4.752324 | −7.3581 |
| PCTDC_113 | −4.345043 | −3.027864 | −2.915782 | −2.857641 | −3.202537 |
| PCTDC_114 | −1.556411 | −1.673897 | −1.841856 | −2.564856 | −1.955312 |
| PCTDC_115 | −1.410966 | −1.522985 | −1.206489 | −1.477594 | −2.159136 |
| PCTDC_116 | −1.671688 | −1.465093 | −1.653697 | −1.982813 | −2.208729 |
| PCTDC_117 | −4.229105 | −5.642348 | −3.183808 | −4.386364 | −6.983963 |
| PCTDC_118 | −1.964442 | 1.805349 | −1.85113 | −4.038047 | −1.632577 |
| PCTDC_119 | −2.186803 | −1.022619 | −2.035141 | −2.479424 | −2.150818 |
| PCTDC_120 | −1.430576 | −1.102015 | −1.132152 | −1.812828 | −3.149442 |
| PCTDC_121 | −4.904629 | −2.872402 | −2.430766 | −5.292966 | −5.347709 |
| PCTDC_122 | −3.6904 | −2.680579 | −1.969049 | −4.20231 | −7.732623 |
| PCTDC_123 | −4.49448 | −6.431859 | 3.257086 | −5.054696 | −8.789499 |
| PCTDC_124 | −1.744154 | −1.817764 | −1.186199 | −1.778908 | −1.913888 |
| PCTDC_125 | −4.713228 | −6.320646 | −3.339272 | −5.216887 | −8.649884 |
| PCTDC_126 | −4.696732 | −6.627284 | −3.523528 | −5.722506 | −10.116261 |
| PCTDC_127 | −1.108407 | −1.057277 | −1.179754 | −1.385472 | −1.268484 |
| PCTDC_128 | −4.545651 | −2.638318 | −2.41323 | −5.386978 | −4.731944 |
| PCTDC_129 | −5.034372 | −2.967628 | −2.568805 | −4.976381 | −5.099236 |
| PCTDC_130 | −2.051642 | −2.098477 | −1.837924 | −1.707663 | −1.703864 |
| PCTDC_131 | 2.627375 | −2.67068 | 1.834017 | −1.765682 | −2.783329 |
| PCTDC_132 | −4.665012 | −3.317816 | −3.19454 | −6.633753 | −6.66045 |
| PCTDC_133 | −2.946086 | −2.116852 | −1.72241 | −3.087247 | −3.948884 |
| PCTDC_134 | −3.058105 | −2.498846 | −2.002397 | −2.88534 | −3.806821 |
| PCTDC_135 | −1.687653 | −1.845589 | −1.873229 | −2.343037 | −1.830697 |
| PCTDC_136 | −2.200974 | −2.152797 | −1.148252 | −1.83632 | −1.976489 |
| PCTDC_137 | −10.828956 | −5.270857 | −4.860933 | −5.900774 | −9.482695 |
| PCTDC_138 | −2.895159 | −2.965245 | 2.169616 | −1.927329 | −3.188821 |
| PCTDC_139 | −3.934355 | −2.826199 | −2.375097 | −3.812811 | −3.661432 |
| PCTDC_140 | −1.904256 | −2.79029 | −1.253306 | −1.295051 | −2.622534 |
| PCTDC_141 | −3.08367 | −3.345164 | −2.524613 | −2.622477 | −3.134956 |
| PCTDC_142 | −2.957271 | −1.985764 | −2.006083 | −2.92826 | −3.725083 |
| PCTDC_143 | −1.066036 | −1.67104 | −1.015772 | −1.546854 | −1.530618 |
| PCTDC_144 | −1.445624 | −1.807576 | −1.111409 | −1.48605 | −3.227776 |
| PCTDC_145 | −3.07717 | −2.146355 | −1.129324 | −2.287934 | −2.854114 |
| PCTDC_146 | −7.009215 | −3.635918 | −3.136031 | −5.086275 | −5.066755 |
| PCTDC_147 | −4.207016 | −5.540858 | −3.094626 | −4.090336 | −6.743286 |
| PCTDC_148 | −1.351986 | −1.336251 | −1.004627 | −1.225727 | −1.128605 |
| PCTDC_149 | −4.108362 | −2.621138 | −2.309178 | −4.294799 | −4.056478 |
| PCTDC_150 | −5.98528 | −2.98137 | −3.386578 | −2.302485 | −4.899428 |
| PCTDC_151 | −3.855859 | −2.506654 | −2.1212 | −3.633645 | −6.417445 |
| PCTDC_152 | 5.204085 | −5.826153 | −3.315112 | −4.699694 | −9.195724 |
| PCTDC_153 | −2.591242 | −3.623291 | −1.582283 | −2.397384 | −4.042944 |
| PCTDC_154 | −1.988355 | −1.956847 | −1.400108 | −1.495448 | −1.414439 |
| PCTDC_155 | −3.045794 | −2.256173 | −1.79689 | −2.80938 | −3.849687 |
| PCTDC_156 | −1.985825 | −1.668599 | −1.772614 | −1.848234 | −1.905182 |
| PCTDC_157 | −24.091743 | −6.946621 | −7.996484 | −26.935823 | −23.703266 |
| PCTDC_158 | −1.650762 | −2.664782 | −1.50441 | −1.354878 | −2.137988 |
| PCTDC_159 | −1.149911 | −1.36099 | −1.640492 | −1.368059 | −1.395896 |
| PCTDC_160 | −3.750376 | −2.5433 | −2.277271 | −3.585937 | −4.150171 |
| PCTDC_161 | −1.889016 | −1.961895 | −1.7557 | −1.8793 | −1.652045 |
| PCTDC_162 | −3.621216 | −2.569228 | −2.185721 | −3.014324 | −3.992921 |
| PCTDC_163 | −1.837535 | −1.75843 | −1.906056 | −2.043089 | −2.040604 |
| PCTDC_164 | −1.248544 | −2.1374 | −1.981841 | −1.865184 | −1.622861 |
| PCTDC_165 | −1.095199 | −1.295839 | −1.833439 | −1.770437 | −1.344037 |
| PCTDC_166 | −2.718937 | −2.558548 | −3.240606 | −3.848436 | −3.650884 |
| PCTDC_167 | −4.016697 | −2.559193 | −2.349691 | −3.895859 | −4.55859 |
| PCTDC_168 | −2.680113 | −2.068863 | −1.738906 | −2.575072 | −3.449777 |
| PCTDC_169 | −1.661317 | −1.56804 | −1.022683 | −1.889948 | −2.182787 |
| PCTDC_170 | −2.058542 | −2.438631 | −2.294661 | −2.185661 | −2.612388 |
| PCTDC_171 | −1.668753 | −1.852991 | −1.614027 | −1.467932 | −2.244333 |
| PCTDC_172 | −1.337232 | −1.28112 | −1.140765 | −1.241679 | −1.518697 |
| PCTDC_173 | −1.23684 | −1.628725 | −1.725804 | −1.686747 | −2.797905 |
| PCTDC_174 | −1.578831 | −1.530159 | −1.323276 | −1.448158 | −3.484801 |
| PCTDC_175 | −6.860311 | −8.596538 | −6.015227 | −7.395287 | −6.868768 |
| PCTDC_176 | 1.416791 | −1.700415 | −1.08375 | −1.233969 | −1.22021 |
| PCTDC_177 | −1.947781 | −1.898147 | −1.996725 | −1.230632 | −2.043674 |
| PCTDC_178 | −1.914441 | −1.735873 | −1.912667 | −2.333658 | −2.213283 |
| PCTDC_179 | −1.584291 | −4.533706 | −1.981395 | −1.249368 | −1.442302 |
| PCTDC_180 | −1.035091 | −1.290039 | −1.996445 | −2.50551 | −1.144317 |
| PCTDC_181 | −1.88717 | −2.132685 | −2.245895 | −1.921092 | −1.720108 |
| PCTDC_182 | −7.096983 | −11.581309 | −3.847387 | −6.296889 | −7.922583 |
| PCTDC_183 | −1.641561 | −2.313724 | −1.780369 | −2.408584 | −1.815283 |
| PCTDC_184 | −1.761954 | −3.35066 | −1.288622 | −1.667949 | −2.856786 |
| PCTDC_185 | −1.25742 | −1.907512 | −1.662129 | −1.913995 | −1.710638 |
| PCTDC_186 | −1.340019 | −1.549101 | −1.453753 | −1.605042 | −1.663931 |
| PCTDC_187 | −1.803373 | −1.169177 | −1.637415 | −1.929255 | −1.797708 |
| PCTDC_188 | −5.764035 | −8.496846 | −4.912166 | −7.168073 | −5.870468 |
| PCTDC_189 | −3.328565 | −3.022969 | −3.115447 | −4.255837 | −4.161739 |
| PCTDC_190 | −1.254828 | −1.472193 | −1.478995 | −1.744422 | −1.826931 |
| PCTDC_191 | −2.159151 | −3.128419 | −1.950118 | −2.926632 | −1.847003 |
| PCTDC_192 | 1.236833 | −1.962486 | 1.002009 | −1.568607 | −1.256739 |
| PCTDC_193 | −3.631537 | −2.738209 | −2.246517 | −3.775388 | −6.564242 |
| PCTDC_194 | −4.487526 | −3.650918 | −3.31222 | −5.680427 | −6.258502 |
| PCTDC_195 | −1.8363 | −1.64694 | −1.935888 | −2.529458 | −2.259551 |
| PCTDC_196 | −2.474186 | −3.365656 | −1.343502 | −3.501091 | −4.264999 |
| PCTDC_197 | −1.807832 | −2.29473 | −1.370198 | −3.162165 | −5.352941 |
| PCTDC_198 | −2.344617 | −2.959151 | −2.17081 | −2.163698 | −2.65943 |
| PCTDC_199 | −4.386623 | −2.638841 | −2.480235 | −4.108781 | −4.452411 |
| PCTDC_200 | −2.09309 | −1.775309 | −1.933533 | −2.33589 | −2.088803 |
| PCTDC_201 | −1.450764 | −1.617985 | −1.051829 | −1.23726 | −3.690548 |
| PCTDC_202 | −3.046799 | −1.879969 | −2.648411 | −4.555435 | −3.545973 |
| PCTDC_203 | 1.108333 | −1.612469 | −1.357317 | 1.574016 | −1.019122 |
| PCTDC_204 | −8.862192 | −8.515929 | −3.496506 | −7.670859 | −13.681435 |
| PCTDC_205 | −1.075394 | −5.071301 | −1.509261 | −1.556702 | −1.422097 |
| PCTDC_206 | −1.737375 | −1.89541 | −1.9666 | −1.855576 | −1.827961 |
| PCTDC_207 | −2.82381 | −6.325802 | −2.511963 | −3.987634 | −2.676592 |
| PCTDC_208 | −1.656419 | −2.065864 | −1.284579 | −3.513086 | −1.361242 |
| PCTDC_209 | −5.483701 | −11.85375 | −3.020115 | −4.377883 | −5.433315 |
| PCTDC_210 | −1.15939 | −1.060312 | −1.423204 | −1.415902 | −1.342489 |
| PCTDC_211 | −4.027411 | −2.378188 | −2.177797 | −3.458907 | −3.85693 |
| PCTDC_212 | −1.658192 | −1.55431 | −1.589337 | −1.643705 | −1.989426 |
| PCTDC_213 | −1.72558 | −1.483346 | −1.542145 | −1.676729 | −2.45592 |
| PCTDC_214 | −2.161695 | −2.26164 | −2.339913 | −2.524176 | −2.457808 |
| PCTDC_215 | −2.529369 | −3.011394 | −2.542804 | −2.727487 | −3.088225 |
| PCTDC_216 | −1.656439 | −1.592109 | −1.819538 | −2.245645 | −1.654958 |
| PCTDC_217 | −1.847873 | −2.74288 | −1.248616 | −1.452109 | −2.042847 |
| PCTDC_218 | −1.166439 | −1.756858 | −1.308203 | −1.469586 | 1.014225 |
| PCTDC_219 | −1.252568 | −1.684199 | −1.155907 | 1.40619 | −1.54444 |
| PCTDC_220 | −4.17908 | −2.748761 | −2.267626 | −3.527103 | −3.513831 |
| PCTDC_221 | −4.836594 | −7.768823 | −3.52599 | −4.42607 | −10.136181 |
| PCTDC_222 | −3.906126 | −2.907072 | −2.068267 | −3.461873 | −6.774076 |
| PCTDC_223 | −1.100584 | −2.114033 | −1.601058 | −1.638044 | −1.699998 |
| PCTDC_224 | −4.242598 | −2.839127 | −2.379757 | −3.524704 | −3.613482 |
| PCTDC_225 | −4.777097 | −7.94543 | −3.501098 | −4.389704 | −10.008644 |
| PCTDC_226 | −4.540014 | −7.1293 | −3.391137 | −4.181539 | −9.32625 |
| PCTDC_227 | −1.422441 | −1.1647 | −1.218198 | −1.332996 | −1.117286 |
| PCTDC_228 | −3.922249 | −5.863266 | −3.065356 | −3.744807 | −6.576053 |
| PCTDC_229 | −5.263347 | −3.294776 | −2.501016 | −4.652264 | −4.555173 |
| PCTDC_230 | −3.925831 | −2.796558 | −2.098749 | −3.53759 | −7.084292 |
| PCTDC_231 | −5.242747 | −8.259526 | −3.789936 | −4.696026 | −11.373317 |
| PCTDC_232 | −2.294399 | −1.745048 | −1.850713 | −2.168706 | −2.485562 |
| PCTDC_233 | −1.238592 | −1.419183 | 1.100986 | −1.086468 | −1.028074 |
| PCTDC_234 | −2.238329 | −1.225333 | −1.22022 | −1.634064 | −1.887437 |
| PCTDC_235 | −26.014566 | −26.899576 | −22.260601 | −14.416063 | −30.63615 |
| PCTDC_236 | −1.525063 | −1.403936 | −1.457327 | 1.779269 | −2.068593 |
| PCTDC_237 | −1.342953 | −1.138019 | −1.133785 | −1.373282 | −1.051208 |
| PCTDC_238 | −1.501538 | −1.644368 | −1.863785 | −1.657531 | −1.664238 |
| PCTDC_239 | −1.904965 | −1.884623 | −1.672115 | −1.567592 | −1.527552 |
| PCTDC_240 | −2.111756 | −1.555367 | −1.523962 | −1.949346 | −1.554618 |
| PCTDC_241 | −2.691587 | −1.19034 | −1.934832 | −2.253114 | −2.510615 |
| PCTDC_242 | −2.298609 | −1.381359 | −1.308637 | −1.46631 | −1.679047 |
| PCTDC_243 | −1.402621 | 1.085415 | 1.062659 | −1.091258 | −1.358562 |
| PCTDC_244 | −3.540937 | −1.836178 | −2.367527 | −3.391082 | −2.486673 |
| PCTDC_245 | −2.214928 | −1.84093 | −1.84495 | −2.022239 | −1.820758 |
| PCTDC_246 | −1.76635 | −1.63073 | −1.682651 | −1.966334 | −1.6663 |
| PCTDC_247 | −1.778498 | 1.015742 | −1.128503 | −1.557932 | −1.658755 |
| PCTDC_248 | −4.171661 | −4.078993 | −3.07633 | −1.408247 | −2.28533 |
| PCTDC_249 | −5.12327 | −7.903827 | −3.478949 | −4.345335 | −9.133308 |
| PCTDC_250 | −4.108335 | −2.688739 | −2.270979 | −3.676643 | −3.862636 |
| PCTDC_251 | −4.484256 | −2.09902 | −2.316149 | −4.576964 | −2.427416 |
| PCTDC_252 | 1.110065 | −3.469609 | −1.558385 | −1.43239 | −1.210027 |
| PCTDC_253 | −1.699842 | −1.454623 | −1.422735 | −1.761389 | −1.237906 |
| PCTDC_254 | −1.831613 | −1.491833 | −1.792443 | 2.372589 | −5.5415 |
| PCTDC_255 | −2.389394 | −1.260788 | −1.077165 | −2.063594 | −1.515193 |
| PCTDC_256 | −2.79098 | −3.093994 | −1.257646 | −2.697717 | 1.756046 |
| PCTDC_257 | −2.007114 | −2.008637 | −1.469927 | −1.515188 | −1.6455 |
| PCTDC_258 | −1.608199 | −2.027372 | −1.10816 | −1.153414 | −2.64577 |
| PCTDC_259 | −2.354438 | −1.372294 | 1.226844 | −2.133314 | −1.354503 |
| PCTDC_260 | −2.604011 | −4.336377 | −1.289437 | −2.013778 | 4.400435 |
| PCTDC_261 | −1.537797 | −1.141336 | −1.495266 | −1.746315 | −1.160505 |
| PCTDC_262 | −2.753373 | −2.140275 | −2.532053 | −2.554981 | −1.703069 |
| PCTDC_263 | −1.785774 | −1.551533 | −1.656989 | −2.030993 | −1.766316 |
| PCTDC_264 | −3.580837 | −2.326493 | −2.58249 | −2.59469 | −2.352746 |
| PCTDC_265 | −2.374061 | −3.093873 | −1.422594 | −3.02511 | −1.326881 |
| PCTDC_266 | −3.302186 | −2.145091 | −2.473056 | −3.285471 | −2.608865 |
| PCTDC_267 | −2.346302 | −1.468917 | −1.721191 | −1.507031 | −1.709475 |
| PCTDC_268 | −2.107902 | −1.580947 | −2.055259 | −2.15739 | −1.497125 |
| PCTDC_269 | −2.541823 | −2.595453 | −3.66834 | −3.796033 | −3.32306 |
| PCTDC_270 | −2.54968 | −1.897837 | −1.5039 | −4.030859 | −2.933698 |
| PCTDC_271 | −4.312228 | −2.626342 | −3.335603 | −4.055226 | −3.386051 |
| PCTDC_272 | −2.036159 | −1.363548 | −1.613196 | −2.056096 | −1.644075 |
| PCTDC_273 | −1.466514 | −1.47301 | −1.619885 | −1.322114 | −2.217748 |
| PCTDC_274 | −2.826242 | −2.691233 | −2.291895 | −4.644922 | −2.121244 |
| PCTDC_275 | −1.862883 | −5.515562 | −2.056687 | −4.536572 | −1.252029 |
| PCTDC_276 | −4.188195 | −2.804357 | −2.14192 | −3.4069 | −7.087134 |
| PCTDC_277 | −3.316963 | −2.355866 | −2.018188 | −3.210177 | −2.994663 |
| PCTDC_278 | −1.59519 | −1.208626 | −1.073164 | −1.516793 | −1.36901 |
| PCTDC_279 | −3.328695 | −2.402078 | −2.674182 | −3.365015 | −2.838426 |
| PCTDC_280 | −2.00892 | −1.959798 | −1.418687 | −1.551801 | −1.356092 |
| PCTDC_281 | −2.085441 | −1.306356 | −1.934703 | −2.34709 | −1.849548 |
| PCTDC_282 | −2.031199 | −4.178926 | −1.501072 | −2.093809 | −1.027688 |
| PCTDC_283 | −2.256392 | −1.16297 | −1.590518 | −2.591235 | −2.012158 |
| PCTDC_284 | −2.433178 | −2.244144 | −1.806869 | −2.403887 | −3.270381 |
| PCTDC_285 | −2.107364 | −1.348654 | −1.292773 | −2.284883 | −1.276845 |
| PCTDC_286 | −1.011685 | −1.400408 | −1.559272 | −1.384357 | −1.122806 |
| PCTDC_287 | −1.979708 | −1.298204 | −1.255026 | −2.021377 | −1.188739 |
| PCTDC_288 | −2.305089 | −1.880831 | −2.239136 | −2.554946 | −2.08069 |
| PCTDC_289 | −1.486956 | −1.98167 | −1.036458 | −1.09955 | −2.816411 |
| PCTDC_290 | −3.562744 | −3.871484 | −1.923246 | −2.427721 | −3.265605 |
| PCTDC_291 | −3.097702 | −2.600365 | −2.303037 | −2.929789 | −3.116413 |
| PCTDC_292 | −1.56978 | −1.183312 | −1.520002 | −1.641381 | −1.129012 |
| PCTDC_293 | −10.18624 | −3.780659 | −5.276081 | −11.313716 | −10.131436 |
| PCTDC_294 | −3.900229 | −4.336713 | −1.672553 | −2.304041 | −6.733215 |
| PCTDC_295 | −1.209046 | −1.122768 | −1.587951 | −1.498479 | 1.044804 |
| PCTDC_296 | −3.698761 | −2.350756 | −2.777413 | −3.755806 | −2.51192 |
| PCTDC_297 | −3.093647 | −3.761977 | −2.186037 | −1.308696 | −2.641925 |
| PCTDC_298 | −2.297807 | −1.410159 | −1.9196 | −1.950024 | −1.650355 |
| PCTDC_299 | −1.89521 | −1.354424 | −1.123448 | −1.873263 | −1.36766 |
| PCTDC_300 | −1.42162 | −1.602237 | −1.268964 | −1.253886 | −1.127024 |
| PCTDC_301 | −2.943285 | −2.148288 | −1.191947 | −2.763554 | 2.763937 |
| PCTDC_302 | −6.406439 | −2.028337 | −2.167836 | −2.019916 | −1.109315 |
| PCTDC_303 | −2.817563 | −2.154164 | −1.78874 | −2.779721 | −4.163968 |
| PCTDC_304 | −7.464938 | −3.133507 | −4.03298 | −7.604817 | −5.315706 |
| PCTDC_305 | −2.014723 | −2.095896 | −1.131347 | −2.008184 | −2.41007 |
| PCTDC_306 | −3.969199 | −2.738114 | −2.292288 | −3.43873 | −3.428852 |
| PCTDC_307 | −1.417446 | −1.376043 | −1.435508 | −1.638834 | −1.476408 |
| PCTDC_308 | −8.653403 | −20.58325 | −4.370862 | −5.277433 | −15.810896 |
| PCTDC_309 | −3.137505 | −3.304923 | −3.245285 | −3.165118 | −2.716445 |
| PCTDC_310 | −12.061647 | −5.272011 | −5.720038 | −12.138116 | −11.271891 |
| PCTDC_311 | −2.115049 | −1.485084 | −1.570765 | −2.19385 | −1.463544 |
| PCTDC_312 | 1.481472 | −1.618008 | −1.014678 | −1.243736 | −1.10675 |
| PCTDC_313 | −1.273086 | 1.043674 | −1.00678 | −1.091739 | 1.003629 |
| PCTDC_314 | −2.49528 | −1.981606 | −2.53176 | −2.166479 | −1.675072 |
| PCTDC_315 | −4.246729 | −5.756291 | −3.252714 | −3.78408 | −6.582098 |
| PCTDC_316 | −1.270286 | 1.212425 | −1.341502 | 1.115258 | −1.351564 |
| PCTDC_317 | 1.354967 | −1.090403 | 1.094382 | 1.319759 | 1.075027 |
| PCTDC_318 | −1.418532 | −1.182988 | −1.410398 | −1.462745 | −1.37438 |
| PCTDC_319 | −2.847453 | −1.610835 | −2.137122 | −4.008525 | −2.580153 |
| PCTDC_320 | −1.570447 | −1.646244 | −1.15019 | −1.643979 | −1.055569 |
| PCTDC_321 | −1.523534 | 1.03465 | −1.379848 | −1.80666 | −1.725373 |
| PCTDC_322 | −1.959616 | −1.836321 | −1.791546 | −1.885724 | −2.337018 |
| PCTDC_323 | −1.759654 | −1.876256 | −1.381283 | −2.053537 | −1.730219 |
| PCTDC_324 | −4.241111 | −3.697052 | −3.347769 | −3.735688 | −3.168041 |
| PCTDC_325 | −4.293188 | −3.750995 | −2.755883 | −2.867415 | −5.334981 |
| PCTDC_326 | −2.483399 | −1.89337 | −1.533312 | −2.253657 | −2.249147 |
| PCTDC_327 | −1.918311 | −1.479681 | −2.0809 | −2.437624 | −2.628933 |
| PCTDC_328 | −4.101023 | −2.454861 | −1.939533 | −2.924037 | −3.540413 |
| PCTDC_329 | −3.325883 | −3.202878 | −2.660003 | −2.620374 | −2.884403 |
| PCTDC_330 | −4.325046 | −5.603637 | −2.757072 | −3.08421 | −6.878116 |
| PCTDC_331 | −2.936653 | −2.221632 | −1.802164 | −2.695677 | −4.706359 |
| PCTDC_332 | −1.649843 | −1.262365 | −1.228164 | −1.48323 | −1.408435 |
| PCTDC_333 | −2.141754 | −2.134733 | −1.757711 | −2.809459 | −1.735782 |
| PCTDC_334 | −3.501326 | −4.491755 | −2.473015 | −2.947388 | −6.778422 |
| PCTDC_335 | −1.227933 | −1.317701 | −1.295 | −1.258839 | −1.293943 |
| PCTDC_336 | −3.148972 | −2.179465 | −1.555655 | −2.493189 | −5.507409 |
| PCTDC_337 | −3.966367 | −2.473189 | −1.953672 | −3.182715 | −4.397205 |
| PCTDC_338 | −1.899115 | −1.978631 | −1.556313 | −1.552081 | −1.990791 |
| PCTDC_339 | −2.671378 | −1.864997 | −1.524507 | −2.402448 | −4.48918 |
| PCTDC_340 | −2.728256 | −2.135133 | −1.584932 | −2.20714 | −3.585228 |
| PCTDC_341 | −3.673474 | −4.037199 | −2.388833 | −3.204217 | −6.281793 |
| PCTDC_342 | −3.58528 | −2.442878 | −1.646449 | −2.521667 | −6.100334 |
| PCTDC_343 | −1.679677 | −1.991002 | −1.348143 | −1.318828 | −1.511339 |
| PCTDC_344 | −3.23739 | −3.437972 | −1.895346 | −3.190621 | −1.744413 |
| PCTDC_345 | −1.644668 | −2.779138 | −1.517523 | 1.364956 | −1.674406 |
| PCTDC_346 | −2.173687 | −1.90845 | −2.221743 | −2.314945 | −1.510086 |
| PCTDC_347 | −3.215951 | −2.527133 | −2.775464 | −3.561818 | −3.815771 |
| PCTDC_348 | −1.723149 | −1.577233 | 1.023316 | 1.173152 | −2.244136 |
| PCTDC_349 | −4.606752 | −5.350285 | 1.07467 | −3.393382 | 3.494553 |
| PCTDC_350 | −1.673569 | −2.053359 | 1.517985 | −1.509558 | −1.985934 |
| PCTDC_351 | −2.15345 | −2.781823 | 1.5802 | −1.603137 | −2.436613 |
| PCTDC_352 | −1.918688 | −4.757151 | 1.269333 | −2.993961 | −3.911849 |
| PCTDC_353 | −1.068852 | −2.075098 | −1.336365 | −1.345524 | −2.028439 |
| PCTDC_354 | −1.008482 | −1.545598 | −1.110947 | −1.199497 | 1.067307 |
| PCTDC_355 | −1.020998 | −1.740442 | −1.828657 | −1.44221 | −1.683714 |
| PCTDC_356 | −4.541613 | −6.258914 | −1.221775 | −2.06907 | 1.022882 |
| PCTDC_357 | −1.893087 | −2.572712 | −1.617558 | −1.725631 | −2.670305 |
| PCTDC_358 | −3.481641 | −2.246628 | −1.780498 | −2.936959 | −3.004195 |
| PCTDC_359 | −3.538222 | −3.849429 | −2.165769 | −3.021411 | −5.941804 |
| PCTDC_360 | −1.793573 | −2.921968 | −1.638617 | −1.843308 | −2.364318 |
| PCTDC_361 | −2.291991 | −1.61443 | −1.443631 | −1.733552 | −1.618359 |
| PCTDC_362 | −1.670359 | −1.499924 | −1.285046 | −1.541224 | −1.269314 |
| PCTDC_363 | −1.802833 | −1.689108 | −1.911253 | −2.12268 | −2.399896 |
| PCTDC_364 | −1.898284 | −1.981644 | −1.924549 | −1.549852 | −2.081147 |
| PCTDC_365 | 4.22351 | −9.226021 | 3.084101 | −1.705691 | −11.104012 |
| PCTDC_366 | −1.888896 | −1.85332 | −2.192266 | −2.289319 | −2.119952 |
| PCTDC_367 | −1.97838 | −1.367645 | −1.522653 | −2.071325 | −2.921427 |
| PCTDC_368 | −1.759534 | −1.378262 | −1.961315 | −1.663318 | −1.758865 |
| PCTDC_369 | −1.840346 | −2.035742 | −2.124624 | −1.275016 | −1.85635 |
| PCTDC_370 | −2.007089 | 1.096472 | −1.096968 | −1.650896 | −1.568698 |
| PCTDC_371 | −3.043957 | −2.778382 | −3.056535 | −4.018412 | −6.229258 |
| PCTDC_372 | −1.488775 | −1.266047 | −1.503389 | −1.584015 | −1.764421 |
| PCTDC_373 | −2.474675 | −1.855865 | −2.397671 | −3.08373 | −4.650255 |
| PCTDC_374 | −1.477882 | −2.920208 | −1.197682 | 1.409172 | −1.21861 |
| PCTDC_375 | −1.345356 | −1.468122 | −1.632299 | −1.213916 | −1.686642 |
| PCTDC_376 | −2.18548 | −3.157719 | −1.975049 | −2.149141 | −2.804915 |
| PCTDC_377 | −3.444881 | −3.297239 | −2.220726 | −4.062848 | −2.433287 |
| PCTDC_378 | −4.045188 | −1.286256 | −1.490966 | −2.940182 | −1.901902 |
| PCTDC_379 | −4.225448 | −2.540783 | −1.936715 | −3.018784 | −3.767159 |
| PCTDC_380 | −2.938715 | −3.974298 | −1.779847 | −2.547801 | −1.31499 |
| PCTDC_381 | −4.600126 | −2.575117 | −2.007174 | −3.468507 | −4.303986 |
| PCTDC_382 | −3.937433 | −5.777416 | −2.985915 | −3.02475 | −6.739953 |
| PCTDC_383 | −3.820225 | −5.31635 | −2.647508 | −3.152502 | −6.585879 |
| PCTDC_384 | −2.898999 | −2.564559 | −2.41546 | −2.562159 | −2.392565 |
| PCTDC_385 | −1.971279 | −1.510526 | −1.926565 | −1.778569 | −1.995005 |
| PCTDC_386 | −3.693599 | −5.350247 | −2.611449 | −2.99702 | −6.727289 |
| PCTDC_387 | −3.671165 | −2.35536 | −1.846964 | −2.844131 | −3.411843 |
| PCTDC_388 | −6.418478 | −2.875051 | −2.671779 | −6.267906 | −8.002217 |
| PCTDC_389 | −3.510195 | −2.252676 | −1.83295 | −2.903546 | −3.303936 |
| PCTDC_390 | −2.303 | −1.856063 | −1.523551 | −2.242671 | −3.465624 |
| PCTDC_391 | −1.787495 | −2.155359 | −1.689284 | −1.394923 | −1.520547 |
| PCTDC_392 | −2.296905 | −1.875615 | −1.871569 | −1.92093 | −1.96803 |
| PCTDC_393 | −1.118759 | −1.34588 | −1.05869 | −1.307118 | 1.076997 |
| PCTDC_394 | −14.147042 | −27.16382 | −10.344748 | −10.396039 | −17.129059 |
| PCTDC_395 | −1.990524 | 1.161036 | −1.893522 | −2.769256 | −2.91797 |
| PCTDC_396 | −1.563106 | −2.419688 | −1.19848 | −2.27685 | 1.625479 |
| PCTDC_397 | −1.65502 | −3.812934 | −1.760821 | −1.792365 | 1.010416 |
| PCTDC_398 | −1.810502 | −1.8462 | −1.610123 | −1.943737 | −1.689724 |
| PCTDC_399 | −1.897382 | −2.459177 | −1.758665 | −2.345544 | −1.599726 |
| PCTDC_400 | −1.745117 | 1.215976 | 1.159521 | −2.366141 | −1.683216 |
| PCTDC_401 | −2.316692 | −2.547475 | −1.865808 | −2.672911 | −2.25369 |
| PCTDC_402 | −1.895008 | −2.318722 | −1.982123 | −1.897704 | −1.610391 |
| PCTDC_403 | −2.206829 | −1.992888 | −1.958218 | −2.322778 | −1.765563 |
| PCTDC_404 | −3.24259 | 1.105085 | 1.600145 | −1.331533 | −1.211876 |
| PCTDC_405 | −1.461492 | −3.163721 | −1.309089 | 1.201983 | −1.057724 |
| PCTDC_406 | −3.758136 | −5.656469 | −1.197139 | −4.133626 | −2.615841 |
| PCTDC_407 | 1.043213 | −5.557227 | −1.607802 | −2.326464 | −21.611631 |
| PCTDC_408 | −1.865685 | −2.494514 | −1.59753 | −1.834113 | −1.55844 |
| PCTDC_409 | −5.336955 | −2.904762 | −2.434043 | −4.500535 | −4.37821 |
| PCTDC_410 | −2.80336 | −2.559432 | −1.839973 | −1.461133 | −3.095735 |
| PCTDC_411 | −1.90841 | −1.111871 | −1.727242 | −2.36153 | −1.560955 |
| PCTDC_412 | −6.033443 | −5.572865 | −2.395153 | −5.529053 | −7.323551 |
| PCTDC_413 | −2.243366 | −2.065153 | −1.848375 | −2.587145 | −1.635368 |
| PCTDC_414 | 2.023767 | 1.331859 | 2.169444 | −1.916078 | −1.403027 |
| PCTDC_415 | −3.920775 | −2.252436 | −3.213345 | −5.994901 | −4.956508 |
| PCTDC_416 | −7.442655 | −2.28381 | −2.242605 | −3.477119 | −2.146398 |
| PCTDC_417 | −2.607719 | −2.390978 | −2.229146 | −2.052244 | −2.063334 |
| PCTDC_418 | −4.090001 | −2.633664 | −2.038903 | −3.328784 | −6.567248 |
| PCTDC_419 | −2.023584 | 1.352602 | −1.670136 | −2.5473 | −2.245735 |
| PCTDC_420 | −2.251421 | 1.800712 | −1.947923 | −4.515185 | −1.667579 |
| PCTDC_421 | −2.21586 | −2.398456 | −2.138798 | −2.086025 | 1.06367 |
| PCTDC_422 | −5.115602 | −9.702243 | −1.006393 | −6.4676 | −3.524682 |
| PCTDC_423 | −1.831691 | 1.008045 | −1.119537 | −1.713724 | 1.0263 |
| PCTDC_424 | −1.11881 | −2.558552 | −1.29532 | −1.944752 | −1.721406 |
| PCTDC_425 | −3.606344 | −1.584107 | −1.723869 | −5.365775 | −3.688865 |
| PCTDC_426 | −2.116754 | 1.178401 | −1.201768 | −2.278917 | −1.92316 |
| PCTDC_427 | −3.06407 | −3.861369 | −3.700923 | −3.038453 | −2.201797 |
| PCTDC_428 | −1.974874 | 1.030132 | 1.112083 | −2.272229 | −1.298947 |
| PCTDC_429 | −2.138915 | −10.298188 | −2.214486 | −1.305676 | −1.288579 |
| PCTDC_430 | −2.040858 | 1.937925 | −1.854622 | −3.497624 | −1.320876 |
| PCTDC_431 | −4.125475 | −2.652308 | −2.345984 | −3.330373 | −3.384879 |
| PCTDC_432 | −1.75307 | −1.49367 | −1.544939 | −1.801559 | −1.458804 |
| PCTDC_433 | −2.272839 | −2.53438 | −1.61612 | −2.163939 | −2.00098 |
| PCTDC_434 | −1.28826 | −1.575161 | −1.58858 | −1.686772 | −1.054567 |
| PCTDC_435 | −5.220012 | −7.5921 | −3.568733 | −4.668806 | −8.816271 |
| PCTDC_436 | −1.194001 | −1.267171 | −1.202947 | −1.160666 | −1.904211 |
| PCTDC_437 | −4.118565 | −2.392381 | −1.881881 | −3.254918 | −3.592949 |
| PCTDC_438 | −2.799394 | −2.12613 | −1.812833 | −2.694802 | −3.01254 |
| PCTDC_439 | −2.606339 | −2.348985 | −2.160693 | −2.992317 | −2.952945 |
| PCTDC_440 | −1.644827 | −1.259022 | −1.456172 | −1.209592 | −1.548498 |
| PCTDC_441 | −2.326669 | −1.780098 | −2.208816 | −2.820748 | −2.577038 |
| PCTDC_442 | −2.462439 | −2.061104 | −1.573771 | −2.394099 | −2.343858 |
| PCTDC_443 | −9.429247 | −4.145243 | −4.631259 | −9.646797 | −7.486014 |
| PCTDC_444 | −3.822721 | −2.7215 | −1.607755 | −3.124867 | −3.169854 |
| PCTDC_445 | −4.733167 | −5.118199 | −2.359844 | −4.211793 | −4.978528 |
| PCTDC_446 | −2.242095 | −2.142577 | −1.814265 | −2.243981 | −1.820491 |
| PCTDC_447 | −1.873643 | −2.16026 | −1.803395 | −2.071719 | −1.670508 |
| PCTDC_448 | −1.228048 | −1.156409 | −1.297073 | −1.128794 | −1.177185 |
| PCTDC_449 | −1.243277 | −1.308936 | −1.231462 | −1.932546 | −1.105554 |
| PCTDC_450 | −1.825526 | −1.926383 | −1.841183 | −2.168026 | −1.812707 |
| PCTDC_451 | −1.960918 | −2.016697 | −1.027948 | −1.270407 | −1.836382 |
| PCTDC_452 | −1.013147 | −1.118609 | −1.454832 | −1.847407 | −1.027153 |
| PCTDC_453 | −1.859579 | −1.580305 | −1.656572 | −2.144008 | −1.537008 |
| PCTDC_454 | −2.86018 | −2.866956 | −1.411291 | −2.079742 | −2.578795 |
| PCTDC_455 | −1.18778 | −1.118609 | −1.298338 | −1.736544 | 1.111227 |
| PCTDC_456 | −1.202898 | −1.348395 | −1.104627 | −1.09717 | 1.032196 |
| PCTDC_457 | −3.921933 | −2.491198 | −2.09695 | −3.465019 | −3.414396 |
| PCTDC_458 | −4.198047 | −2.623072 | −2.234297 | −3.627238 | −3.373092 |
| PCTDC_459 | −4.147692 | −2.674235 | −2.27989 | −3.407578 | −3.197421 |
| PCTDC_460 | −4.249775 | −2.763192 | −2.221259 | −3.763872 | −3.620351 |
| PCTDC_461 | −5.280007 | −7.671776 | −3.699308 | −4.451082 | −8.672559 |
| PCTDC_462 | −3.57887 | −2.278907 | −1.935006 | −3.113895 | −3.381089 |
| PCTDC_463 | −2.981488 | −2.488562 | −2.14119 | −3.487246 | −3.115881 |
| PCTDC_464 | −2.379064 | −2.893599 | −1.953627 | −2.104885 | −2.612707 |
| PCTDC_465 | −2.479421 | −3.298689 | −2.407963 | −2.989532 | −3.314621 |
| PCTDC_466 | −1.410138 | −1.44473 | −1.258094 | −1.596811 | −1.593217 |
| PCTDC_467 | −2.390594 | −2.345222 | −1.961068 | −2.361172 | −2.357436 |
| PCTDC_468 | −1.680336 | −3.259171 | −1.838008 | −2.652272 | −1.206303 |
| PCTDC_469 | −2.045475 | −1.709187 | −1.800676 | −2.270922 | −1.779019 |
| PCTDC_470 | −1.983869 | −3.163117 | −1.795463 | −2.738596 | −1.964095 |
| PCTDC_471 | −2.451482 | −1.574182 | −1.89738 | −2.73348 | −1.87724 |
| PCTDC_472 | −1.037877 | −1.923896 | −2.101907 | −3.020603 | −1.84166 |
| PCTDC_473 | −1.751684 | −1.556972 | −1.634768 | −2.287308 | −1.514002 |
| PCTDC_474 | −4.04888 | −3.69383 | −2.858062 | −3.35046 | −4.122208 |
| PCTDC_475 | −2.757834 | −2.932736 | −1.846393 | −2.068793 | −2.324373 |
| PCTDC_476 | −1.312905 | −1.293242 | −1.655551 | −1.990178 | −1.110877 |
| PCTDC_477 | −2.038354 | −1.61711 | −1.890354 | −4.704314 | −1.76905 |
| PCTDC_478 | −2.165554 | −1.980344 | −1.793583 | −1.943708 | −1.758711 |
| PCTDC_479 | −4.170393 | −2.573389 | −2.156788 | −3.468242 | −3.309002 |
| PCTDC_480 | −1.707033 | −1.169422 | −1.193386 | −1.478945 | −1.621326 |
| PCTDC_481 | −3.940004 | −2.535416 | −2.119418 | −3.3859 | −3.558542 |
| PCTDC_482 | −2.601739 | −1.264894 | −1.697132 | −3.261934 | −2.244717 |
| PCTDC_483 | −2.718768 | −2.185249 | −1.651059 | −1.869576 | −2.812357 |
| PCTDC_484 | −2.39852 | −1.631899 | −1.848976 | −2.475552 | −1.284731 |
| PCTDC_485 | −2.057471 | −2.066126 | −2.464797 | −2.260879 | −1.797202 |
| PCTDC_486 | −1.164735 | −1.380944 | −1.368693 | −1.605741 | −1.046789 |
| PCTDC_487 | 1.351533 | −1.199158 | −1.211928 | −1.358015 | 1.112984 |
| PCTDC_488 | −2.173894 | −1.688027 | −1.826145 | −2.155279 | −1.247267 |
| PCTDC_489 | −6.81174 | −4.885068 | −3.691052 | −6.952291 | −5.914726 |
| PCTDC_490 | −2.693876 | −2.168933 | −1.795236 | −2.225158 | −1.464391 |
| PCTDC_491 | 1.022384 | −1.962803 | −1.111503 | −1.53311 | −1.457028 |
| PCTDC_492 | −4.435233 | −4.72611 | −2.31092 | −4.114769 | −5.46749 |
| PCTDC_493 | −1.726497 | 1.237203 | −1.684367 | −2.214422 | −2.250615 |
| PCTDC_494 | −3.986704 | −10.214438 | −2.235956 | −1.289291 | −3.902556 |
| PCTDC_495 | −9.662001 | −4.017264 | −4.912549 | −7.437357 | −8.433582 |
| PCTDC_496 | −1.931297 | −2.426281 | −1.483111 | −1.651267 | −1.59488 |
| PCTDC_497 | −4.386757 | −2.803833 | −2.258645 | −3.774412 | −3.796883 |
| PCTDC_498 | −1.910983 | −1.800007 | −1.728982 | −1.602626 | −2.152866 |
| PCTDC_499 | −3.801859 | −2.794723 | −1.966794 | −3.332434 | −6.132774 |
| PCTDC_500 | −3.766929 | −2.549677 | −1.934078 | −3.285396 | −5.195549 |
| PCTDC_501 | −2.497117 | −1.798926 | −1.79396 | −1.974637 | −3.059483 |
| PCTDC_502 | −4.022521 | −1.818765 | −1.942933 | −2.244681 | −1.375072 |
| PCTDC_503 | −1.384349 | −1.163179 | −1.623914 | −1.462417 | −1.09429 |
| PCTDC_504 | −3.270537 | −2.029771 | −1.740615 | −2.643592 | −2.993415 |
| PCTDC_505 | −5.003045 | −3.663749 | −4.378886 | −3.824932 | −5.549801 |
| PCTDC_506 | −1.345389 | −1.281099 | −1.152219 | −1.296648 | −1.080703 |
| PCTDC_507 | −4.757814 | −7.498409 | −1.651077 | −5.082231 | −10.403072 |
| PCTDC_508 | −2.800021 | −2.040236 | −1.515285 | −2.37896 | −2.617315 |
| PCTDC_509 | −2.934403 | −4.523464 | −1.688992 | −3.833131 | −7.293571 |
| PCTDC_510 | −1.476941 | −2.454367 | −1.741225 | −1.378503 | −1.920962 |
| PCTDC_511 | −1.973351 | −1.731608 | −1.729295 | −1.56888 | −1.714635 |
| PCTDC_512 | −2.655767 | −19.708242 | −1.225767 | −3.286163 | −18.513933 |
| PCTDC_513 | −3.147304 | −47.15366 | −1.472986 | −4.223797 | −53.499794 |
| PCTDC_514 | −2.896986 | −42.338341 | −1.397007 | −4.191507 | −44.630997 |
| PCTDC_515 | −2.789012 | −2.157998 | −1.996718 | −1.580221 | −2.797045 |
| PCTDC_516 | −1.372227 | −2.083936 | −1.553563 | −1.535993 | −1.558006 |
| PCTDC_517 | −2.612071 | −2.37371 | −2.24176 | −2.073574 | −2.146933 |
| PCTDC_518 | −3.503985 | −1.595497 | −1.11622 | −2.607165 | −1.074117 |
| PCTDC_519 | −5.198984 | −9.360762 | −7.042399 | −10.017647 | −5.152067 |
| PCTDC_520 | −1.335818 | 1.267761 | −2.617651 | 1.228106 | −1.36805 |
| PCTDC_521 | −2.380674 | −2.470443 | −2.565333 | −2.267503 | −2.319755 |
| PCTDC_522 | −1.350376 | −1.445063 | −1.346426 | −1.360597 | −1.340386 |
| PCTDC_523 | −2.445678 | −2.15636 | −2.008549 | −1.974647 | −2.243389 |
| PCTDC_524 | −3.786515 | −2.643449 | −2.021266 | −2.914837 | −3.078571 |
| PCTDC_525 | −5.028649 | −1.391998 | −1.738997 | −3.433631 | −2.018528 |
| PCTDC_526 | 1.012703 | −1.66488 | −1.121852 | −1.066909 | −1.140691 |
| PCTDC_527 | −4.322382 | −5.28279 | −2.794171 | −3.210779 | −6.969234 |
| PCTDC_528 | −1.037666 | −1.481409 | −1.933469 | −1.923975 | −1.000878 |
| PCTDC_529 | −4.203119 | −2.413176 | −1.883237 | −3.05964 | −3.565671 |
| PCTDC_530 | −3.489052 | −1.022411 | −1.351068 | −3.08581 | −2.888702 |
| PCTDC_531 | −2.788715 | 1.008337 | −1.266413 | −2.898742 | −2.418625 |
| PCTDC_532 | −1.599621 | −1.732217 | −1.172744 | −1.01763 | −1.412733 |
| PCTDC_533 | −3.127232 | −3.188901 | −3.005321 | −2.579616 | −2.570059 |
| PCTDC_534 | −1.528137 | −1.314179 | −2.057945 | −2.069454 | −1.574109 |
| PCTDC_535 | −1.786282 | −2.101565 | −2.098175 | −2.198452 | −1.403034 |
| PCTDC_536 | −1.177096 | −1.031142 | −1.319487 | −1.140883 | 1.343581 |
| PCTDC_537 | −3.799112 | −2.701041 | −1.966207 | −3.6021 | −6.962352 |
| PCTDC_538 | −1.977907 | −1.31051 | −1.444315 | −1.750597 | −1.304521 |
| PCTDC_539 | −3.053032 | −2.333641 | −1.411762 | −2.712081 | −3.116833 |
| PCTDC_540 | 2.15045 | −2.562178 | 1.666789 | −1.648637 | −2.499994 |
| PCTDC_541 | −2.255368 | −2.092699 | −2.72356 | −2.457666 | −2.074179 |
| PCTDC_542 | −3.057606 | −2.365003 | −1.936607 | −2.646039 | −3.576478 |
| PCTDC_543 | −2.02795 | −1.1764 | −1.487945 | −1.991581 | −1.52056 |
| PCTDC_544 | −2.35955 | −3.624348 | 1.159183 | −3.163264 | −2.038474 |
| PCTDC_545 | −3.578978 | −2.29385 | −2.024204 | −2.684515 | −2.701118 |
| PCTDC_546 | −4.24607 | −3.474969 | −4.85251 | −6.135162 | −5.773375 |
| PCTDC_547 | −1.790011 | −2.155357 | −2.026831 | −2.01 | −1.520742 |
| PCTDC_548 | −2.02119 | −2.574125 | 1.103573 | −2.249537 | −2.783807 |
| PCTDC_549 | −1.087209 | −1.240978 | −1.428093 | −1.7115 | 1.06794 |
| PCTDC_550 | −3.323033 | −2.491836 | −1.86641 | −3.041298 | −5.106065 |
| PCTDC_551 | −2.214859 | −1.530053 | −1.05263 | −1.959219 | −1.045903 |
| PCTDC_552 | −1.231717 | −2.050832 | −2.720342 | −2.200618 | −1.941845 |
| PCTDC_553 | −1.025631 | −2.275231 | −1.452125 | −2.132788 | −1.666659 |
| PCTDC_554 | −1.135718 | −1.081424 | −1.407248 | −1.361144 | 1.153963 |
| PCTDC_555 | −3.005455 | −4.273493 | −2.095281 | −1.541273 | −4.177554 |
| PCTDC_556 | −2.298774 | −2.56509 | −1.304017 | −1.308648 | −3.126355 |
| PCTDC_557 | −2.642847 | −3.578011 | −1.344106 | −3.135075 | −6.856468 |
| PCTDC_558 | −2.091945 | −2.207287 | −2.653325 | −2.720855 | −2.248579 |
| PCTDC_559 | −2.178046 | −1.506931 | −1.37275 | −2.056458 | −1.884107 |
| PCTDC_560 | −3.988228 | −2.979001 | −3.621165 | −5.204254 | −3.823349 |
| PCTDC_561 | −26.0333 | −8.337242 | −9.079122 | −24.277685 | −22.783827 |
| PCTDC_562 | −1.108282 | 1.164169 | 1.039573 | −1.053774 | 1.113347 |
| PCTDC_563 | −1.573374 | −1.054869 | 1.167521 | 1.08473 | −1.576548 |
| PCTDC_564 | −3.087662 | −2.850971 | −3.033665 | −3.457917 | −3.067259 |
| PCTDC_565 | −2.004796 | −1.672195 | −1.761897 | −1.906638 | −1.521024 |
| PCTDC_566 | −1.573435 | −1.588811 | −1.115372 | −1.014231 | 1.284361 |
| PCTDC_567 | −1.904652 | −1.555524 | −1.938543 | −1.984841 | −1.28467 |
| PCTDC_568 | −1.068629 | 1.213866 | −1.78508 | −1.641857 | −2.221032 |
| PCTDC_569 | −2.375146 | −2.102661 | −2.029639 | −1.663989 | −1.420596 |
| PCTDC_570 | −9.608533 | −8.61835 | −3.753283 | −9.15265 | −17.243759 |
| PCTDC_571 | −3.498796 | 1.100427 | 1.52337 | −1.171291 | −1.235893 |
| PCTDC_572 | −1.714235 | −1.05276 | −1.427239 | −2.068653 | −1.311309 |

| | Colon | Colon | Colon | Colon | Colon |
|---|---|---|---|---|---|
| Internal Id | Tumor 6 | Tumor 7 | Tumor 8 | Tumor 9 | Tumor 10 |
| PCTDC_1 | −2.083407 | −8.688679 | −9.78441 | −14.029575 | −6.670203 |
| PCTDC_2 | −2.114774 | −4.047634 | −2.835961 | −2.071182 | −3.214962 |
| PCTDC_3 | −1.927832 | −3.16564 | −2.886491 | −2.446894 | −1.904502 |
| PCTDC_4 | −1.855833 | −1.014881 | −6.896226 | −1.656962 | −2.489081 |
| PCTDC_5 | −1.842869 | −3.031669 | −2.735307 | −3.107583 | −2.954397 |
| PCTDC_6 | −1.232452 | −1.392996 | −1.036028 | −1.758322 | −3.107631 |
| PCTDC_7 | −8.855359 | −1.216792 | −24.185755 | 1.414277 | −18.743429 |
| PCTDC_8 | −1.019038 | −1.904193 | −1.840326 | −2.781147 | −3.551286 |
| PCTDC_9 | −16.077021 | −59.434616 | −38.668518 | −51.549026 | −43.448406 |
| PCTDC_10 | −2.379478 | −3.532775 | −1.889631 | −2.401799 | −4.232121 |
| PCTDC_11 | −5.102507 | −20.116104 | −7.378749 | −9.099745 | −8.085587 |
| PCTDC_12 | 1.072907 | −1.407256 | 1.180162 | −1.905116 | −3.182707 |
| PCTDC_13 | −4.354877 | −4.62117 | −11.826143 | −3.442251 | −5.913578 |
| PCTDC_14 | −1.56822 | −2.118925 | −1.938972 | −1.961342 | −1.970369 |
| PCTDC_15 | −2.433607 | −5.873315 | −2.510856 | −1.735214 | −5.508246 |
| PCTDC_16 | −3.29295 | −6.804746 | −2.026004 | −2.810378 | −1.862623 |
| PCTDC_17 | −2.036594 | −2.364163 | −4.195938 | −3.319173 | −3.066366 |
| PCTDC_18 | −1.872667 | −4.038313 | −2.298284 | −2.932148 | −2.821428 |
| PCTDC_19 | −2.898973 | −3.003338 | −2.332875 | −1.90442 | −2.035478 |
| PCTDC_20 | −4.287554 | −3.738031 | −19.061356 | −3.511957 | −10.332695 |
| PCTDC_21 | −1.115742 | −5.497366 | 1.296405 | −3.967105 | −4.493529 |
| PCTDC_22 | 1.448982 | −2.034846 | −2.080018 | −1.381942 | −6.800498 |
| PCTDC_23 | −5.260255 | −5.300622 | −19.321873 | −11.009766 | −11.427928 |
| PCTDC_24 | −3.6086 | −7.682777 | −4.40144 | −4.022962 | −2.925095 |
| PCTDC_25 | −3.207089 | −2.655337 | −3.553803 | −6.520929 | −3.446985 |
| PCTDC_26 | −1.940149 | −3.591095 | −1.951122 | −1.37034 | −3.077018 |
| PCTDC_27 | 3.660588 | −10.868382 | 1.926474 | −1.630994 | −8.4668 |
| PCTDC_28 | −1.321581 | −3.660369 | −1.933117 | −2.098044 | −4.096041 |
| PCTDC_29 | −1.005047 | −2.532266 | −2.431369 | −2.85346 | −3.993455 |
| PCTDC_30 | −1.960798 | −2.788447 | −3.257213 | −2.917638 | −2.279913 |
| PCTDC_31 | −1.46709 | −2.706539 | −3.315894 | −3.28479 | −1.964129 |
| PCTDC_32 | −1.97579 | −2.158711 | −2.641496 | −2.999132 | −2.193696 |
| PCTDC_33 | −1.526485 | −1.673905 | −1.723348 | −2.351685 | −2.155787 |
| PCTDC_34 | −4.70703 | −12.4248 | −6.442802 | −6.281425 | −5.773592 |
| PCTDC_35 | −1.891547 | −2.539454 | −2.715621 | −3.328795 | −1.898967 |
| PCTDC_36 | −2.28446 | −2.584173 | −2.668974 | −1.717271 | −1.928648 |
| PCTDC_37 | −4.428577 | −9.50749 | −5.010199 | −4.99507 | −3.553512 |
| PCTDC_38 | −1.792163 | −3.028126 | −2.257229 | −2.170509 | −4.585708 |
| PCTDC_39 | −2.005652 | −4.330509 | −2.296262 | −4.873521 | −2.819757 |
| PCTDC_40 | −1.772813 | −4.667068 | −2.386149 | −2.537639 | −3.865486 |
| PCTDC_41 | 1.564349 | −2.61227 | −3.514743 | −3.92785 | −2.121385 |
| PCTDC_42 | −3.7603 | −9.58972 | −4.996074 | −4.661958 | −4.888981 |
| PCTDC_43 | −2.077527 | −3.233304 | −2.467427 | −2.282286 | −2.178664 |
| PCTDC_44 | −2.102059 | −3.104153 | −4.135684 | −3.281705 | −3.038427 |
| PCTDC_45 | −2.089204 | −2.438284 | −5.021548 | −2.835689 | −5.339724 |
| PCTDC_46 | −2.472825 | 1.256632 | −5.916982 | −13.388905 | −2.907615 |
| PCTDC_47 | −3.70784 | −4.090519 | −10.020152 | −4.129423 | −6.91205 |
| PCTDC_48 | −1.450668 | −2.800931 | −2.528788 | −2.254879 | −2.278187 |
| PCTDC_49 | −1.29667 | −2.640137 | −1.01344 | −2.202153 | −3.045769 |
| PCTDC_50 | −6.235202 | −18.762634 | −8.1091263 | −8.401872 | −8.138474 |
| PCTDC_51 | −4.412484 | −9.920094 | −5.504246 | −5.859859 | −4.390945 |
| PCTDC_52 | −2.228088 | −4.798067 | −4.327576 | −5.975545 | −4.351716 |
| PCTDC_53 | −1.588446 | −3.653877 | −2.09207 | −2.502064 | −3.282234 |
| PCTDC_54 | −1.68808 | −2.522207 | −2.462492 | −2.462886 | −2.378968 |
| PCTDC_55 | −2.748683 | −9.275631 | −7.243145 | −6.042737 | −1.017954 |
| PCTDC_56 | −4.223862 | −9.964831 | −5.768355 | −6.104057 | −5.487343 |
| PCTDC_57 | −2.605145 | −8.748384 | −6.431192 | −5.936039 | 1.013381 |
| PCTDC_58 | −1.912733 | −2.253616 | −2.626545 | −1.998992 | −1.811559 |
| PCTDC_59 | −1.583744 | −2.902067 | −2.160966 | −2.559188 | −2.171652 |
| PCTDC_60 | −4.594235 | −9.801021 | −6.549976 | −8.366997 | −6.324865 |
| PCTDC_61 | −1.721365 | −2.107157 | −2.72991 | −2.706889 | −2.094767 |
| PCTDC_62 | −1.656653 | −2.405285 | −2.427855 | −1.90805 | −1.702626 |
| PCTDC_63 | −2.059103 | −1.267867 | −2.900948 | −5.406435 | −2.089989 |
| PCTDC_64 | −3.331235 | −3.260733 | −8.222388 | −2.997291 | −5.712786 |
| PCTDC_65 | −1.749293 | −1.990184 | −2.138188 | −2.393138 | −4.281384 |
| PCTDC_66 | −1.418086 | −2.319613 | −2.252599 | −1.721568 | −1.527662 |
| PCTDC_67 | −1.44361 | −2.3941 | −2.584812 | −2.320981 | −2.128469 |
| PCTDC_68 | −1.453052 | −3.169803 | −2.645681 | −3.19537 | −2.847229 |
| PCTDC_69 | −1.607833 | −2.533608 | −3.170008 | −3.630129 | −2.208691 |
| PCTDC_70 | −1.883712 | −4.296963 | −4.564299 | −5.013136 | −3.408126 |
| PCTDC_71 | −1.567635 | −2.335572 | −1.933825 | −2.3208 | −4.172569 |
| PCTDC_72 | −1.275921 | −1.417767 | −3.189466 | −2.712248 | −2.466872 |
| PCTDC_73 | −2.065163 | −1.510612 | −3.397659 | −2.772774 | −2.795055 |
| PCTDC_74 | −4.120387 | −8.364182 | −5.820191 | −8.033478 | −5.058536 |
| PCTDC_75 | −5.651796 | −2.522639 | −11.103881 | −8.209849 | −2.939723 |
| PCTDC_76 | −1.300726 | −2.012938 | −2.021577 | −2.267975 | −2.526409 |
| PCTDC_77 | 1.156325 | −2.42797 | −1.702881 | −2.322926 | −2.977733 |
| PCTDC_78 | −1.994662 | −4.118546 | −3.399733 | −4.519724 | −3.063789 |
| PCTDC_79 | −3.005263 | −3.964085 | −3.305238 | −6.023715 | −3.777092 |
| PCTDC_80 | −2.22871 | −2.531804 | −2.986517 | −2.009376 | 1.426795 |
| PCTDC_81 | −1.029887 | −2.659047 | −1.291147 | −1.465626 | −2.568156 |
| PCTDC_82 | −1.456901 | −2.558453 | −1.890956 | −1.654315 | −2.291716 |
| PCTDC_83 | −1.483869 | −1.774219 | −1.906184 | −2.040671 | −1.55863 |
| PCTDC_84 | −1.488962 | −1.738312 | −2.997032 | −3.06989 | −2.522394 |
| PCTDC_85 | −3.397085 | −1.800004 | −4.670069 | −5.907787 | −4.243998 |
| PCTDC_86 | −4.629498 | −5.268767 | −16.325615 | −5.504815 | −10.1651917 |
| PCTDC_87 | −2.965783 | −4.651131 | −4.426116 | −5.074196 | −3.048017 |
| PCTDC_88 | 1.176969 | −1.816881 | −2.221296 | −2.040161 | −3.435726 |
| PCTDC_89 | −4.648353 | −5.023491 | −16.478586 | −5.259194 | −10.594707 |
| PCTDC_90 | −3.987328 | −3.317574 | −10.907522 | −7.503156 | −7.047785 |
| PCTDC_91 | −4.017776 | −3.727969 | −10.129467 | −7.625894 | −6.47775 |
| PCTDC_92 | −1.55329 | −2.539011 | −2.670223 | −2.961054 | −2.324611 |
| PCTDC_93 | 1.239372 | −2.519451 | −1.614062 | −2.468781 | −2.956497 |
| PCTDC_94 | −1.568057 | −2.680018 | −2.582005 | −3.017979 | −2.11765 |
| PCTDC_95 | −1.838165 | −2.816427 | −3.051432 | −3.385318 | −2.692921 |
| PCTDC_96 | −2.54813 | −2.836381 | −3.19527 | −1.011483 | −1.329053 |
| PCTDC_97 | −1.734123 | −2.982916 | −2.245812 | −4.641543 | −2.431019 |
| PCTDC_98 | −1.863264 | −4.766246 | −2.206263 | −2.463233 | −2.087883 |
| PCTDC_99 | −2.330333 | −8.410342 | −5.218665 | −4.778626 | −4.32383 |
| PCTDC_100 | −1.487802 | −6.952064 | −3.395472 | −3.807495 | −5.184178 |
| PCTDC_101 | −2.103176 | −2.342718 | −3.634921 | −1.789127 | −3.305705 |
| PCTDC_102 | −3.95919 | −3.523541 | −15.429191 | −9.570858 | −11.63169 |
| PCTDC_103 | −1.597318 | −3.302787 | −1.97656 | −1.831488 | −2.571605 |
| PCTDC_104 | −2.179013 | −8.550433 | −4.822043 | −9.241587 | −8.620716 |
| PCTDC_105 | −1.186902 | −2.28356 | −1.916777 | −2.520292 | −4.656952 |
| PCTDC_106 | −1.574975 | −4.112132 | −2.460182 | −2.674212 | −2.620046 |
| PCTDC_107 | −1.285797 | −4.282806 | −2.194912 | −2.682937 | −2.991414 |
| PCTDC_108 | −1.536358 | −5.271469 | −2.617043 | −3.87438 | −5.142908 |
| PCTDC_109 | −1.098137 | −6.498635 | −2.601364 | −4.266908 | −7.241029 |
| PCTDC_110 | −5.741544 | −20.645773 | −8.901743 | −13.201766 | −9.474846 |
| PCTDC_111 | −3.784938 | −4.775443 | −13.710231 | −4.736529 | −9.753855 |
| PCTDC_112 | −3.770256 | −3.896379 | −13.006416 | −8.495649 | −9.174363 |
| PCTDC_113 | −3.182243 | −5.411848 | −3.122021 | −6.497146 | −5.564974 |
| PCTDC_114 | −1.430802 | −1.9482 | −1.666666 | −2.218147 | −1.823165 |
| PCTDC_115 | −1.466078 | −2.758297 | −2.215887 | −2.567012 | −4.594712 |
| PCTDC_116 | −1.510808 | −4.142076 | −2.876519 | −3.256964 | −2.992515 |
| PCTDC_117 | −3.690495 | −4.032526 | −12.182355 | −8.187602 | −9.412992 |
| PCTDC_118 | 3.702723 | −6.816492 | 1.465504 | −3.411267 | −5.558865 |
| PCTDC_119 | −1.699052 | −2.68473 | −3.509726 | −3.446977 | −3.184815 |
| PCTDC_120 | −2.18336 | 1.201436 | −5.29367 | −5.691936 | −5.728442 |
| PCTDC_121 | −4.335685 | −4.980919 | −17.322721 | −5.555618 | −13.936533 |
| PCTDC_122 | −3.943798 | −4.159578 | −20.717194 | −3.961968 | −13.265989 |
| PCTDC_123 | −4.220544 | −4.458473 | −16.951117 | −10.633861 | −11.06091 |
| PCTDC_124 | −1.876516 | −2.220029 | −2.524925 | −1.514067 | −1.913248 |
| PCTDC_125 | −4.156865 | −3.94276 | −15.586668 | −9.926511 | −11.538962 |
| PCTDC_126 | −4.275777 | −4.537924 | −15.922481 | −9.872524 | −11.471142 |
| PCTDC_127 | −1.158254 | −2.990276 | −2.605285 | −3.485199 | −3.114484 |
| PCTDC_128 | −4.151817 | −4.414096 | −17.50596 | −5.337328 | −13.212199 |
| PCTDC_129 | −4.137128 | −5.355405 | −15.638588 | −5.499931 | −11.5353 |
| PCTDC_130 | −2.287815 | −2.981069 | −2.060238 | −1.37465 | −1.877548 |
| PCTDC_131 | −1.387256 | −4.366215 | −2.788288 | −2.56777 | −2.021314 |
| PCTDC_132 | −3.80588 | −7.436905 | −4.451353 | −5.046357 | −3.825623 |
| PCTDC_133 | −2.73899 | −3.233242 | −6.990095 | −2.77934 | −5.504802 |
| PCTDC_134 | −2.891005 | −3.158316 | −5.96714 | −3.160015 | −4.867879 |
| PCTDC_135 | −1.486067 | −4.24235 | −2.986602 | 1.492916 | −3.130219 |
| PCTDC_136 | −2.07305 | −2.560523 | −2.921531 | −1.495705 | −2.227009 |
| PCTDC_137 | −6.709738 | −16.989042 | −8.53929 | −10.65459 | −8.351618 |
| PCTDC_138 | −2.49371 | −5.257616 | −2.912396 | −3.793311 | −2.631904 |
| PCTDC_139 | −3.092424 | −3.94329 | −7.177196 | −3.531577 | −5.426573 |
| PCTDC_140 | −2.155357 | −2.246449 | −2.258769 | −2.737894 | −2.926592 |
| PCTDC_141 | −2.443242 | −3.105939 | −4.254194 | −3.02592 | −3.054046 |
| PCTDC_142 | −2.753375 | −2.748035 | −5.325381 | −3.462896 | −4.431551 |
| PCTDC_143 | −1.801544 | −2.933015 | −2.477804 | −2.959098 | −2.615129 |
| PCTDC_144 | −2.065048 | −2.531502 | −3.04369 | −1.003939 | −1.357381 |
| PCTDC_145 | −2.326507 | −2.595412 | −4.664679 | −2.699193 | −3.707924 |
| PCTDC_146 | −2.906322 | −11.119669 | −4.22236 | −7.007662 | −4.997516 |
| PCTDC_147 | −3.452254 | −3.596967 | −10.395126 | −6.16955 | −7.261432 |
| PCTDC_148 | −1.380893 | −3.824272 | −2.648127 | −2.450598 | −2.995833 |
| PCTDC_149 | −3.255341 | −4.28165 | −9.910971 | −4.116663 | −7.631859 |
| PCTDC_150 | −3.171614 | −9.085684 | −4.92853 | −4.902088 | −5.884509 |
| PCTDC_151 | −3.698747 | −4.310469 | −15.277804 | −4.509701 | −10.009133 |
| PCTDC_152 | −4.23119 | −4.110284 | −20.236582 | −11.094976 | −12.877276 |
| PCTDC_153 | −2.712866 | −6.123426 | −3.677176 | −8.167227 | −3.230167 |
| PCTDC_154 | −1.471138 | −2.662261 | −2.621493 | −3.384066 | −3.308468 |
| PCTDC_155 | −2.993447 | −2.75769 | −5.764012 | −3.377901 | −5.71154 |
| PCTDC_156 | −1.974599 | −2.316575 | −2.065084 | −1.892309 | −1.669646 |
| PCTDC_157 | −13.417576 | −52.650387 | −14.037018 | −28.02939 | −13.408166 |
| PCTDC_158 | −1.553338 | −1.968661 | −2.381855 | −2.390924 | −2.822145 |
| PCTDC_159 | −1.276863 | −2.318608 | −2.180403 | −2.889938 | −2.466328 |
| PCTDC_160 | −3.548278 | −3.781662 | −7.474132 | −3.371794 | −6.091012 |
| PCTDC_161 | −1.527334 | −2.943324 | −3.102524 | −2.419431 | −2.648917 |
| PCTDC_162 | −3.127769 | −3.394859 | −6.636523 | −2.867695 | −4.432214 |
| PCTDC_163 | −2.006225 | −2.901773 | −2.346002 | −2.248675 | −2.00109 |
| PCTDC_164 | −1.405297 | −2.948033 | −2.934754 | −4.30079 | −3.859725 |
| PCTDC_165 | −1.588076 | −2.47727 | −2.414314 | −3.631488 | −3.532092 |
| PCTDC_166 | −2.931838 | −4.336748 | −3.24646 | −4.411035 | −2.980717 |
| PCTDC_167 | −3.570338 | −4.178797 | −7.782403 | −3.813373 | −5.671333 |
| PCTDC_168 | −2.688166 | −2.663015 | −4.319777 | −2.573629 | −3.171301 |
| PCTDC_169 | −2.058129 | −2.473203 | −2.952778 | −4.40996 | −3.264037 |
| PCTDC_170 | −2.169586 | −4.30589 | −3.911129 | −4.591723 | −2.672218 |
| PCTDC_171 | −2.225409 | −2.251348 | −2.092346 | −1.972791 | −2.16491 |
| PCTDC_172 | −1.669519 | −2.704463 | −2.297935 | −1.919122 | −1.941853 |
| PCTDC_173 | −2.048641 | −3.10866 | −2.673926 | −2.901284 | −3.034959 |
| PCTDC_174 | −2.081222 | −2.096023 | −2.054026 | −1.053168 | −1.085007 |
| PCTDC_175 | −4.774598 | −12.734313 | −8.883727 | −9.912612 | −8.323947 |
| PCTDC_176 | −1.258965 | −2.632138 | −1.913653 | −2.185067 | −2.483676 |
| PCTDC_177 | −1.939379 | −4.530967 | −2.359891 | −4.078347 | −2.764213 |
| PCTDC_178 | −2.055301 | −5.208098 | −2.614315 | −3.639303 | −3.584429 |
| PCTDC_179 | −2.900685 | −1.154608 | −2.03717 | −6.044252 | −2.34479 |
| PCTDC_180 | −1.415126 | −1.386274 | −1.791795 | −2.670586 | −2.395692 |
| PCTDC_181 | −1.714957 | −2.479498 | −2.910652 | −2.405157 | −3.129045 |
| PCTDC_182 | −6.934667 | −19.723858 | −12.640163 | −17.473091 | −12.771142 |
| PCTDC_183 | −2.414614 | −1.648399 | −1.437117 | −3.31257 | −2.936945 |
| PCTDC_184 | −2.78603 | −2.557558 | −4.300115 | −2.994413 | −3.691492 |
| PCTDC_185 | −1.525948 | −2.479607 | −2.37295 | −3.136964 | −3.129661 |
| PCTDC_186 | −1.246323 | −2.614822 | −2.054178 | −2.435119 | −1.90128 |
| PCTDC_187 | −1.816847 | −4.147898 | −2.062153 | −3.158015 | −2.938852 |
| PCTDC_188 | −4.396978 | −15.750997 | −7.304055 | −15.64049 | −11.103608 |
| PCTDC_189 | −2.94891 | −8.228148 | −5.483788 | −5.084009 | −4.167959 |
| PCTDC_190 | −1.768481 | −3.537523 | −2.037857 | −2.598359 | −2.147279 |
| PCTDC_191 | −2.4262 | −2.804561 | −1.730608 | −5.975543 | −4.760255 |
| PCTDC_192 | −1.741019 | −2.644385 | −3.044426 | −3.826642 | −2.357721 |
| PCTDC_193 | −4.156188 | −4.158795 | −18.791737 | −4.027184 | −9.387738 |
| PCTDC_194 | −5.13086 | −9.800389 | −4.697654 | −6.405068 | −6.736834 |
| PCTDC_195 | −1.81423 | −2.198194 | −1.737582 | −2.735552 | −2.158796 |
| PCTDC_196 | −5.080579 | −4.471194 | −7.231489 | −18.427435 | −9.806072 |
| PCTDC_197 | −2.324542 | −5.903867 | −3.229978 | −17.273748 | −6.400387 |
| PCTDC_198 | −1.932416 | −2.653923 | −3.757628 | −2.735156 | −1.817282 |
| PCTDC_199 | −3.623217 | −4.536964 | −8.831078 | −4.463152 | −6.401208 |
| PCTDC_200 | −2.100615 | −5.586963 | −1.843135 | −5.846531 | −3.071575 |
| PCTDC_201 | −2.379844 | −2.473764 | −2.870435 | −1.025683 | −1.222568 |
| PCTDC_202 | −1.911155 | −8.100895 | −3.645935 | −5.755246 | −7.075781 |
| PCTDC_203 | −2.278131 | −2.146923 | −2.403642 | −3.497723 | −2.42467 |
| PCTDC_204 | −5.798268 | −34.06509 | −12.273384 | −17.905043 | −34.228233 |
| PCTDC_205 | −1.469821 | −2.113142 | −2.577702 | −3.65754 | −2.8461 |
| PCTDC_206 | −1.890783 | −3.518015 | −2.87097 | −3.271979 | −3.320841 |
| PCTDC_207 | −2.473858 | −4.771787 | −4.502133 | −6.395139 | −6.571494 |
| PCTDC_208 | −1.2463 | −2.302852 | −1.63261 | −4.727072 | −3.248115 |
| PCTDC_209 | −5.330461 | −15.063501 | −11.671608 | −15.723096 | −11.474429 |
| PCTDC_210 | −1.569534 | −2.567336 | −2.081995 | −2.780438 | −2.044163 |
| PCTDC_211 | −3.454089 | −3.890421 | −7.289502 | −4.10517 | −6.346364 |
| PCTDC_212 | −1.814972 | −2.492545 | −2.12127 | −2.077773 | −1.769448 |
| PCTDC_213 | −1.928891 | −2.556381 | −2.162709 | −1.529102 | −1.17182 |
| PCTDC_214 | −2.837507 | −5.943567 | −1.049267 | −1.058182 | −4.723122 |
| PCTDC_215 | −3.338695 | −6.675632 | −3.509163 | −4.088458 | −3.590021 |
| PCTDC_216 | −1.727204 | −2.826245 | −1.483557 | −3.021882 | −2.146228 |
| PCTDC_217 | −1.819851 | −2.80383 | −2.80035 | −1.412471 | −1.811291 |
| PCTDC_218 | −1.678976 | −2.935515 | −2.474926 | −3.653771 | −2.784799 |
| PCTDC_219 | −2.652697 | −3.281955 | −1.350641 | −3.027711 | −3.31431 |
| PCTDC_220 | −3.300081 | −3.680073 | −8.556771 | −3.592223 | −5.737456 |
| PCTDC_221 | −4.794336 | −3.827177 | −21.278063 | −11.837326 | −11.247367 |
| PCTDC_222 | −4.288795 | −3.640255 | −17.291485 | −3.768052 | −9.4419 |
| PCTDC_223 | −2.298889 | −2.346835 | −2.776059 | −2.945078 | −2.02338 |
| PCTDC_224 | −3.46923 | −4.02571 | −9.015471 | −3.785506 | −6.03347 |
| PCTDC_225 | −4.385356 | −3.423778 | −20.784225 | −11.31271 | −10.954226 |
| PCTDC_226 | −4.607494 | −3.244585 | −20.744709 | −11.417688 | −10.372003 |
| PCTDC_227 | −1.352514 | −2.258559 | −2.182549 | −2.125192 | −2.144093 |
| PCTDC_228 | −3.884015 | −3.288769 | −12.3219 | −8.174881 | −7.634091 |
| PCTDC_229 | −4.333633 | −4.448777 | −16.964617 | −5.066412 | −9.85986 |
| PCTDC_230 | −4.194637 | −3.671257 | −18.332588 | −3.799327 | −10.502856 |
| PCTDC_231 | −4.70225 | −3.937051 | −19.540285 | −10.537539 | −10.05743 |
| PCTDC_232 | −2.128672 | −5.706282 | −4.30805 | −5.31519 | −5.17726 |
| PCTDC_233 | −1.519963 | −3.768478 | −2.549499 | −2.301235 | −2.82662 |
| PCTDC_234 | −1.264152 | −4.115586 | −4.426901 | −5.132766 | −2.441659 |
| PCTDC_235 | −10.398974 | −35.84404 | −37.890846 | −28.436022 | −40.04533 |
| PCTDC_236 | −1.935501 | −3.037173 | −1.855584 | −1.150821 | −2.050454 |
| PCTDC_237 | −1.274877 | −2.369792 | −2.281013 | −2.097712 | −2.207632 |
| PCTDC_238 | −1.913187 | −4.210544 | −2.658317 | −3.280815 | −3.646399 |
| PCTDC_239 | −1.841173 | −2.362227 | −2.348137 | −1.84079 | −2.010021 |
| PCTDC_240 | −1.687986 | −3.038711 | −2.072264 | −2.204134 | −1.849882 |
| PCTDC_241 | −2.218499 | −3.646227 | −2.971531 | −1.572821 | −1.789804 |
| PCTDC_242 | −2.039107 | −2.208811 | −2.28638 | −1.971873 | −2.074498 |
| PCTDC_243 | −1.318499 | −3.639507 | −2.84055 | −3.161946 | −3.535114 |
| PCTDC_244 | −1.748289 | −7.997188 | −3.286743 | −4.133771 | −4.60195 |
| PCTDC_245 | −1.832195 | −4.165719 | −2.28764 | −1.761182 | −2.417527 |
| PCTDC_246 | −1.595434 | −2.634676 | −2.23967 | −2.666174 | −2.305202 |
| PCTDC_247 | −1.349474 | −2.380194 | −1.999325 | −2.180002 | −2.680629 |
| PCTDC_248 | −3.88447 | −1.569351 | −4.786776 | −5.813709 | −4.900392 |
| PCTDC_249 | −4.527576 | −3.343985 | −19.883654 | −11.058222 | −10.261432 |
| PCTDC_250 | −3.840485 | −3.851627 | −10.762053 | −4.526831 | −8.764568 |
| PCTDC_251 | −2.679081 | −6.497992 | −3.447102 | −3.482586 | −5.451421 |
| PCTDC_252 | −1.821194 | −6.009986 | −1.983636 | −4.484305 | −4.349729 |
| PCTDC_253 | −1.516983 | −3.239355 | −2.960478 | −2.969269 | −2.921623 |
| PCTDC_254 | −3.804338 | −3.96088 | −2.255185 | −2.441548 | −4.56314 |
| PCTDC_255 | −1.348214 | −4.322912 | −2.479361 | −3.79677 | −10.963726 |
| PCTDC_256 | −1.42124 | −1.874196 | −1.572451 | −4.164904 | −2.942757 |
| PCTDC_257 | −1.935026 | −1.793478 | −2.261944 | −1.706943 | −1.84242 |
| PCTDC_258 | −2.164887 | −2.138947 | −2.635155 | 1.101481 | 1.001589 |
| PCTDC_259 | −1.462832 | −1.777587 | −1.151733 | −3.669216 | −5.133826 |
| PCTDC_260 | −2.675976 | 1.970285 | 2.396611 | −2.847489 | 2.130628 |
| PCTDC_261 | −1.368188 | −2.891441 | −1.965796 | −2.099375 | −2.274744 |
| PCTDC_262 | −2.032704 | −4.865805 | −3.031115 | −4.299381 | −3.680209 |
| PCTDC_263 | −1.670561 | −2.093797 | −1.586664 | −2.302789 | −2.545252 |
| PCTDC_264 | −2.172579 | −7.356969 | −4.616506 | −5.189599 | −4.719282 |
| PCTDC_265 | −2.993881 | −10.082272 | −5.890966 | −6.007321 | −7.178654 |
| PCTDC_266 | −2.065178 | −5.472369 | −2.766854 | −3.566468 | −4.449538 |
| PCTDC_267 | −1.508112 | −3.803641 | −2.603237 | −2.931435 | −4.010838 |
| PCTDC_268 | −1.700791 | −2.035907 | −1.889752 | −1.469181 | −1.708773 |
| PCTDC_269 | −2.379198 | −4.543904 | −2.730455 | −4.025674 | −4.433538 |
| PCTDC_270 | 1.069363 | −6.909536 | −1.596846 | −2.536486 | −5.071217 |
| PCTDC_271 | −3.260807 | −6.212852 | −4.560222 | −5.647288 | −3.819784 |
| PCTDC_272 | −1.492992 | −2.927971 | −1.627886 | −1.546699 | −2.915572 |
| PCTDC_273 | −1.438038 | −2.148547 | −2.178608 | −2.320278 | −2.776088 |
| PCTDC_274 | −2.247778 | −3.46386 | −2.572843 | −3.629104 | −3.713943 |
| PCTDC_275 | −1.003338 | −11.410631 | −1.151153 | −11.397514 | −5.726798 |
| PCTDC_276 | −4.217476 | −3.132212 | −19.35323 | −3.765451 | −10.062749 |
| PCTDC_277 | −2.995564 | −2.991639 | −5.738002 | −3.121268 | −4.617397 |
| PCTDC_278 | −1.36545 | −3.049989 | −2.161933 | −2.534092 | −3.634981 |
| PCTDC_279 | −2.094618 | −4.847474 | −3.21493 | −3.531053 | −3.276093 |
| PCTDC_280 | −1.693354 | −2.413334 | −2.310149 | −2.435938 | −2.811727 |
| PCTDC_281 | −1.588091 | −2.687367 | −2.350503 | −2.975265 | −2.875559 |
| PCTDC_282 | −2.549859 | −2.611744 | −2.844443 | −6.270815 | −5.109812 |
| PCTDC_283 | −1.131231 | −4.185311 | −1.866927 | −3.823021 | −5.471189 |
| PCTDC_284 | −2.617707 | −2.880339 | −4.826176 | −2.403895 | −3.537261 |
| PCTDC_285 | −1.262789 | −4.501634 | −2.47389 | −3.228784 | −2.666664 |
| PCTDC_286 | −2.165796 | −3.470174 | −2.341007 | −3.268555 | −2.995115 |
| PCTDC_287 | −1.278287 | −3.824776 | −2.377869 | −3.071996 | −2.574481 |
| PCTDC_288 | −1.875589 | −6.210633 | −3.432205 | −4.671096 | −3.117131 |
| PCTDC_289 | −2.192947 | −2.139038 | −2.965462 | 1.117521 | −1.113814 |
| PCTDC_290 | −2.611839 | −5.507403 | −5.024969 | −4.783923 | −4.289661 |
| PCTDC_291 | −2.479932 | −8.477123 | −5.651296 | −4.749075 | −4.153006 |
| PCTDC_292 | −1.532378 | −2.67058 | −2.009878 | −2.491136 | −2.341999 |
| PCTDC_293 | −6.433547 | −16.108952 | −9.149508 | −9.620059 | −6.977403 |
| PCTDC_294 | −4.070741 | −3.169832 | −5.821867 | −4.436994 | −7.281688 |
| PCTDC_295 | −1.457103 | −2.545094 | −1.963598 | −2.240566 | −2.224381 |
| PCTDC_296 | −2.703047 | −7.823654 | −4.022834 | −5.51972 | −4.912844 |
| PCTDC_297 | −3.034877 | −5.773628 | −4.317933 | −4.100777 | −3.488915 |
| PCTDC_298 | −1.795715 | −1.93728 | −2.387764 | −2.474603 | −2.129225 |
| PCTDC_299 | −1.333848 | −6.838379 | −2.556827 | −2.964774 | −3.187869 |
| PCTDC_300 | −1.224164 | −1.913381 | −2.007162 | −2.272181 | −3.411546 |
| PCTDC_301 | −1.612864 | 1.421686 | 1.108202 | −5.495829 | −2.529128 |
| PCTDC_302 | −3.375747 | 1.517615 | −1.047322 | 1.03283 | −1.205198 |
| PCTDC_303 | −2.98236 | −2.123022 | −4.972325 | −2.771994 | −4.887907 |
| PCTDC_304 | −3.748991 | −8.648803 | −4.297132 | −4.222451 | −4.112308 |
| PCTDC_305 | −2.067976 | −3.095366 | −3.241502 | −4.974222 | −4.456541 |
| PCTDC_306 | −3.433239 | −3.852857 | −8.218064 | −3.541728 | −5.608873 |
| PCTDC_307 | −1.510144 | −2.174652 | −1.960471 | −2.305311 | −2.085746 |
| PCTDC_308 | −5.709903 | −7.506292 | −21.021177 | −18.16979 | −15.282486 |
| PCTDC_309 | −2.538695 | −5.427696 | −3.96977 | −5.34938 | −3.434406 |
| PCTDC_310 | −8.351592 | −15.544457 | −6.618097 | −9.989495 | −7.883212 |
| PCTDC_311 | −1.568636 | −2.643091 | −1.923311 | −2.491152 | −2.016061 |
| PCTDC_312 | 1.07741 | −2.589733 | −2.607608 | −2.462168 | −2.47417 |
| PCTDC_313 | −1.149116 | −2.445372 | −1.996363 | −2.240741 | −2.395751 |
| PCTDC_314 | −1.83386 | −4.455273 | −2.660103 | −3.904015 | −3.88134 |
| PCTDC_315 | −4.020957 | −3.663386 | −11.000549 | −7.362528 | −6.767858 |
| PCTDC_316 | −1.129105 | −3.416999 | −2.177473 | −2.653117 | −2.919225 |
| PCTDC_317 | −1.322192 | −2.006308 | −2.169702 | −2.077435 | −2.53624 |
| PCTDC_318 | −1.068702 | −3.100096 | −2.509806 | −3.332818 | −2.666414 |
| PCTDC_319 | −1.447103 | −7.838775 | −3.137043 | −3.309639 | −6.645592 |
| PCTDC_320 | −1.517501 | −2.395785 | −2.585518 | −2.073397 | −4.045468 |
| PCTDC_321 | −1.211345 | −2.963809 | −2.20423 | −2.320638 | −3.414114 |
| PCTDC_322 | −1.753529 | −4.687747 | −2.546606 | −2.777194 | −2.816231 |
| PCTDC_323 | −1.74737 | −4.210407 | −2.178987 | −3.938169 | −4.408377 |
| PCTDC_324 | −3.110309 | −4.810374 | −3.284321 | −4.389349 | −4.177819 |
| PCTDC_325 | −3.492937 | −7.161442 | −4.917929 | −5.236836 | −5.740018 |
| PCTDC_326 | −2.239092 | −2.973208 | −2.988244 | −1.376134 | −1.895988 |
| PCTDC_327 | −1.870174 | −2.171522 | −1.891829 | −1.711816 | −2.050615 |
| PCTDC_328 | −3.433633 | −3.484589 | −9.24229 | −3.640446 | −5.59146 |
| PCTDC_329 | −3.235591 | −4.306441 | −2.874235 | −3.416734 | −3.269137 |
| PCTDC_330 | −3.690394 | −3.485615 | −11.029022 | −6.335642 | −6.479433 |
| PCTDC_331 | −3.417982 | −2.846125 | −7.170537 | −2.894992 | −5.80286 |
| PCTDC_332 | −1.123622 | −3.094638 | −1.961519 | −3.331235 | −2.068638 |
| PCTDC_333 | −1.905308 | −2.71019 | −2.492548 | −2.638774 | −2.736861 |
| PCTDC_334 | −3.391635 | −2.57456 | −11.102236 | −5.849842 | −6.251497 |
| PCTDC_335 | −1.319804 | −2.484284 | −1.942393 | −2.102638 | −2.640838 |
| PCTDC_336 | −3.612695 | −2.795166 | −11.60204 | −3.320234 | −7.553721 |
| PCTDC_337 | −3.64587 | −3.302513 | −11.300043 | −3.332641 | −6.622171 |
| PCTDC_338 | −2.036446 | −2.547056 | −2.315574 | −1.672926 | −1.673005 |
| PCTDC_339 | −3.058439 | −2.272604 | −7.023274 | −2.677456 | −4.512324 |
| PCTDC_340 | −2.827927 | −2.610447 | −5.930333 | −2.285218 | −3.446473 |
| PCTDC_341 | −3.741079 | −2.618799 | −11.512197 | −6.588821 | −6.15581 |
| PCTDC_342 | −3.831348 | −2.693085 | −15.116555 | −3.094456 | −8.320878 |
| PCTDC_343 | −1.699405 | −2.993683 | −3.541289 | −2.123977 | −2.629834 |
| PCTDC_344 | −3.803385 | −2.496838 | −1.944487 | −1.251222 | −1.08661 |
| PCTDC_345 | −4.892186 | −2.066659 | −1.488773 | −2.048109 | 1.271424 |
| PCTDC_346 | −2.01679 | −2.0381 | −1.794273 | −1.987858 | −1.776335 |
| PCTDC_347 | −3.61717 | −4.590827 | −3.510527 | −3.444241 | −2.840451 |
| PCTDC_348 | −1.163732 | −1.765558 | −2.098776 | −2.404756 | −3.516867 |
| PCTDC_349 | −3.776194 | −8.061971 | −3.085753 | 2.783463 | −4.163679 |
| PCTDC_350 | −1.74484 | −1.054856 | −2.273646 | −1.22114 | −2.518731 |
| PCTDC_351 | −2.126303 | −1.074242 | −2.7906 | −1.168993 | −2.61287 |
| PCTDC_352 | −3.276581 | −8.238791 | −5.228536 | −5.113611 | −4.634111 |
| PCTDC_353 | −1.569322 | −2.203796 | −2.300594 | −2.143878 | −2.061727 |
| PCTDC_354 | −1.148932 | −2.006905 | −2.270097 | −2.420032 | −2.935613 |
| PCTDC_355 | −1.382682 | −2.570274 | −2.082243 | −2.0819 | −2.80178 |
| PCTDC_356 | −2.5360111 | −1.625364 | −2.540703 | −6.342539 | −2.618487 |
| PCTDC_357 | −2.200665 | −1.738183 | −3.051713 | −2.957093 | −3.627696 |
| PCTDC_358 | −2.949249 | −2.735868 | −6.206738 | −3.133926 | −4.475304 |
| PCTDC_359 | −3.461999 | −2.455908 | −11.913185 | −7.039542 | −6.29104 |
| PCTDC_360 | −2.771786 | −4.532234 | −3.035789 | −3.96584 | −4.225999 |
| PCTDC_361 | −2.112897 | −2.089313 | −2.453935 | −1.761781 | −1.766528 |
| PCTDC_362 | −1.370505 | −2.758603 | −2.459529 | −3.364921 | −3.779385 |
| PCTDC_363 | −1.640921 | −3.121555 | −2.376389 | −2.138602 | −2.144983 |
| PCTDC_364 | −1.83666 | −2.059931 | −3.211289 | −2.022543 | −4.047491 |
| PCTDC_365 | −1.263447 | −16.474352 | −3.833677 | −3.515598 | −1.455502 |
| PCTDC_366 | −1.962621 | −2.683585 | −1.982845 | −2.539793 | −2.131283 |
| PCTDC_367 | −1.754204 | −3.520776 | −1.917178 | −2.957508 | −3.464419 |
| PCTDC_368 | −1.539361 | −2.633818 | −2.408538 | −2.715942 | −2.475481 |
| PCTDC_369 | −1.684391 | −3.190459 | −2.843073 | −2.785024 | −2.324296 |
| PCTDC_370 | −1.065779 | −3.231136 | −2.119581 | −2.370553 | −3.640322 |
| PCTDC_371 | −4.206266 | −4.134809 | −2.572417 | −4.510403 | −3.98005 |
| PCTDC_372 | −1.497509 | −3.433379 | −2.431221 | −2.62591 | −2.364552 |
| PCTDC_373 | −2.701431 | −5.541125 | −3.740372 | −4.711283 | −5.363891 |
| PCTDC_374 | −2.062943 | −2.468417 | −2.218792 | −3.703695 | −4.524557 |
| PCTDC_375 | −1.677184 | −3.231339 | −2.047146 | −2.547986 | −2.687473 |
| PCTDC_376 | −2.772744 | −4.423054 | −2.28992 | −4.693399 | −4.732909 |
| PCTDC_377 | −2.563527 | −4.492982 | −3.069068 | −4.294678 | −4.562173 |
| PCTDC_378 | −2.282956 | −2.071853 | −1.218522 | −3.795834 | −2.348081 |
| PCTDC_379 | −3.556599 | −3.71274 | −9.53263 | −3.796503 | −6.069323 |
| PCTDC_380 | −2.849799 | 2.296765 | 1.223609 | −4.261389 | −2.095827 |
| PCTDC_381 | −4.106955 | −3.716886 | −13.196062 | −4.619672 | −8.85029 |
| PCTDC_382 | −3.647153 | −2.899484 | −12.142699 | −6.762471 | −6.210923 |
| PCTDC_383 | −3.781007 | −2.757492 | −12.215237 | −7.54418 | −6.675462 |
| PCTDC_384 | −2.579501 | −2.90819 | −2.191753 | −2.543473 | −2.438313 |
| PCTDC_385 | −1.83999 | −3.014101 | −2.088584 | −1.839071 | −2.999907 |
| PCTDC_386 | −3.633339 | −2.769401 | −10.876658 | −6.694985 | −6.252499 |
| PCTDC_387 | −3.199733 | −3.12726 | −8.164774 | −2.955156 | −4.983577 |
| PCTDC_388 | −3.747109 | −9.926229 | −4.492403 | −4.01534 | −4.989985 |
| PCTDC_389 | −3.158527 | −2.956561 | −7.561758 | −2.747388 | −4.7964 |
| PCTDC_390 | −2.548517 | −2.250637 | −5.084722 | −2.436353 | −4.205762 |
| PCTDC_391 | −1.793494 | −3.306055 | −2.495369 | −2.562027 | −1.9559 |
| PCTDC_392 | −1.988252 | −3.171811 | −2.27029 | −2.387262 | −1.971462 |
| PCTDC_393 | −1.131981 | −2.47366 | −1.950791 | −2.979702 | −5.808935 |
| PCTDC_394 | −7.902956 | −16.22966 | −24.564844 | −23.351175 | −24.049793 |
| PCTDC_395 | −1.128561 | −5.602054 | −2.269211 | −4.024747 | −7.990259 |
| PCTDC_396 | −1.128652 | −2.310545 | −1.895955 | −2.949045 | −3.943671 |
| PCTDC_397 | −1.957875 | −1.435545 | −2.289376 | −2.088355 | −1.497819 |
| PCTDC_398 | −1.463656 | −2.536437 | −2.327757 | −3.223704 | −2.32261 |
| PCTDC_399 | −1.57208 | −2.217453 | −2.250325 | −2.891168 | −3.103871 |
| PCTDC_400 | 1.350873 | −3.66434 | −1.566388 | −2.472184 | −7.061352 |
| PCTDC_401 | −1.778172 | −3.41019 | −2.286762 | −2.406163 | −3.021344 |
| PCTDC_402 | −1.779176 | −2.560131 | −2.858688 | −4.338165 | −7.435108 |
| PCTDC_403 | −1.618405 | −2.691217 | −2.074394 | −2.555042 | −2.342018 |
| PCTDC_404 | −1.801164 | −2.295932 | −2.429118 | −3.811723 | −6.599621 |
| PCTDC_405 | −1.866313 | −2.623849 | −2.376353 | −5.042603 | −5.362969 |
| PCTDC_406 | −2.968811 | −5.255373 | −4.357278 | −5.601061 | −7.791493 |
| PCTDC_407 | −2.518974 | −20.609203 | −4.392604 | −6.316997 | −2.722303 |
| PCTDC_408 | −1.581567 | −3.825832 | −5.100918 | −3.272011 | −4.100996 |
| PCTDC_409 | −4.205354 | −4.244617 | −17.269669 | −5.153924 | −9.591729 |
| PCTDC_410 | −2.744054 | −2.665254 | −5.23113 | −2.69788 | −3.688508 |
| PCTDC_411 | −1.378731 | −3.97056 | −2.251723 | −4.60925 | −5.852931 |
| PCTDC_412 | −2.345133 | −15.503913 | −12.429821 | −19.225355 | −16.954866 |
| PCTDC_413 | −1.65605 | −3.256246 | −3.128621 | −2.342679 | −3.900469 |
| PCTDC_414 | 1.740423 | −3.666911 | −2.733058 | −2.509844 | −2.838648 |
| PCTDC_415 | −3.304775 | −9.66715 | −5.797694 | −7.218999 | −9.178728 |
| PCTDC_416 | −1.816274 | −4.544723 | −3.432478 | −13.144384 | −9.472692 |
| PCTDC_417 | −2.147236 | −3.477573 | −2.670616 | −2.360998 | −2.176139 |
| PCTDC_418 | −4.023874 | −3.216345 | −17.795725 | −3.685657 | −9.244202 |
| PCTDC_419 | −1.132564 | −3.282859 | −1.452853 | −2.953099 | −4.224542 |
| PCTDC_420 | 3.835113 | −7.88019 | 1.879768 | −1.602296 | −7.187496 |
| PCTDC_421 | −1.577877 | −1.032754 | −1.617107 | −2.510909 | −1.548298 |
| PCTDC_422 | −6.743957 | −10.768804 | −10.759794 | −14.728729 | −15.24783 |
| PCTDC_423 | −1.16685 | −3.696149 | −2.139006 | −4.231594 | −4.755056 |
| PCTDC_424 | −1.983778 | −3.899375 | −2.577879 | −2.61241 | −4.033377 |
| PCTDC_425 | −1.723426 | −11.907057 | −2.609665 | −6.127047 | −12.738211 |
| PCTDC_426 | −1.578315 | −3.836931 | −2.091437 | −3.109696 | −3.228948 |
| PCTDC_427 | −2.820146 | −5.154231 | −4.331721 | −5.67382 | −4.049896 |
| PCTDC_428 | −1.095983 | −3.818708 | −1.517295 | −5.526316 | −3.639863 |
| PCTDC_429 | −4.286278 | −2.442652 | −6.461126 | −6.962633 | −2.643682 |
| PCTDC_430 | 4.064054 | −6.751593 | 1.581492 | −2.944198 | −7.217455 |
| PCTDC_431 | −3.300669 | −3.426686 | −8.326731 | −3.519214 | −4.977574 |
| PCTDC_432 | −1.873488 | −3.154468 | −2.206955 | −1.948518 | −3.039134 |
| PCTDC_433 | −2.01857 | −3.910663 | −2.551511 | −3.928213 | −4.674957 |
| PCTDC_434 | −1.390829 | −2.92367 | −2.333632 | −2.249653 | −2.199577 |
| PCTDC_435 | −4.404173 | −4.128571 | −17.027718 | −9.717108 | −9.731349 |
| PCTDC_436 | −1.261343 | −1.759856 | −1.927743 | −2.225657 | −3.104023 |
| PCTDC_437 | −3.464413 | −3.505827 | −9.926498 | −4.018203 | −6.815197 |
| PCTDC_438 | −2.508386 | −5.663525 | −1.898467 | −3.320766 | −2.685038 |
| PCTDC_439 | −2.404006 | −2.682554 | −2.355178 | −2.451406 | −2.047588 |
| PCTDC_440 | −1.364202 | −2.640613 | −2.060328 | −2.039139 | −2.62871 |
| PCTDC_441 | −1.457507 | −2.585803 | −1.890205 | −2.121005 | −2.109571 |
| PCTDC_442 | −2.25791 | −3.318656 | −3.370878 | −1.485723 | −2.232206 |
| PCTDC_443 | −4.522355 | −14.677288 | −5.488232 | −9.310837 | −7.388904 |
| PCTDC_444 | −2.673374 | −6.160846 | −4.838342 | −2.959502 | −6.198854 |
| PCTDC_445 | −3.292587 | −10.502336 | −10.050386 | −3.505228 | −10.975809 |
| PCTDC_446 | −1.72304 | −2.456413 | −1.992708 | −2.33442 | −2.443974 |
| PCTDC_447 | −1.525621 | −2.269687 | −1.663389 | −2.176325 | −1.870524 |
| PCTDC_448 | −1.138005 | −1.9805 | −1.965061 | −2.759055 | −2.718367 |
| PCTDC_449 | 1.247501 | −2.14472 | −1.708293 | −2.419002 | −2.378231 |
| PCTDC_450 | −1.238025 | −3.797982 | −2.002429 | −2.575729 | −6.129398 |
| PCTDC_451 | −2.319706 | −2.740891 | −2.636069 | −1.662029 | −1.269787 |
| PCTDC_452 | −1.103615 | −1.966168 | −1.985103 | −2.362963 | −2.419588 |
| PCTDC_453 | −1.377476 | −3.19715 | −1.681339 | −3.330876 | −2.699991 |
| PCTDC_454 | −2.107279 | −2.543648 | −2.400486 | −2.117301 | −2.781379 |
| PCTDC_455 | 1.084275 | −2.359633 | −1.907869 | −2.50018 | −2.821481 |
| PCTDC_456 | −1.352769 | −3.292715 | −2.280744 | −2.313621 | −2.07801 |
| PCTDC_457 | −3.244624 | −3.680325 | −9.38241 | −4.090302 | −5.999517 |
| PCTDC_458 | −3.411826 | −3.752882 | −9.920869 | −4.132503 | −6.257953 |
| PCTDC_459 | −3.277509 | −3.452338 | −8.875525 | −3.475946 | −5.319915 |
| PCTDC_460 | −3.497402 | −3.646024 | −9.96344 | −4.267687 | −7.248205 |
| PCTDC_461 | −4.164809 | −3.766206 | −15.002592 | −9.621099 | −8.862043 |
| PCTDC_462 | −2.854793 | −3.078645 | −6.668007 | −3.693722 | −6.207499 |
| PCTDC_463 | −2.439668 | −3.133138 | −6.110227 | −3.292491 | −4.770925 |
| PCTDC_464 | −2.221495 | −2.100314 | −3.848471 | −2.619261 | −2.567279 |
| PCTDC_465 | −2.458162 | −2.530385 | −6.778717 | −4.317293 | −3.369215 |
| PCTDC_466 | −1.572988 | −2.917847 | −2.465304 | −2.271055 | −4.42402 |
| PCTDC_467 | −2.167579 | −2.072933 | −3.064006 | −2.583501 | −2.76667 |
| PCTDC_468 | −2.842929 | −1.416433 | −1.290887 | −4.525883 | −3.491836 |
| PCTDC_469 | −1.438455 | −2.230007 | −1.712926 | −1.977794 | −2.058432 |
| PCTDC_470 | −1.927791 | −4.439088 | −3.31788 | −2.961011 | 1.182987 |
| PCTDC_471 | −1.748365 | −4.446304 | −2.649345 | −3.490811 | −4.192489 |
| PCTDC_472 | 1.03894 | 1.027216 | −3.45271 | −2.19805 | −3.567147 |
| PCTDC_473 | −1.171918 | −3.867051 | −1.335986 | −3.011726 | −6.024663 |
| PCTDC_474 | −3.128487 | −5.867784 | −3.845832 | −3.756094 | −4.628043 |
| PCTDC_475 | −2.470888 | −3.857581 | −3.838137 | −3.065844 | −2.988186 |
| PCTDC_476 | −1.222385 | −2.412448 | −2.36894 | −2.051659 | −2.843233 |
| PCTDC_477 | −1.575935 | −3.358423 | −1.957228 | −4.20353 | −5.172051 |
| PCTDC_478 | −1.946568 | −2.538936 | −2.167247 | −1.973462 | −2.095788 |
| PCTDC_479 | −3.227538 | −3.466124 | −8.528288 | −3.727987 | −6.107713 |
| PCTDC_480 | −1.596215 | −2.417819 | −2.582085 | −2.210896 | −2.703929 |
| PCTDC_481 | −3.057556 | −3.262084 | −7.538472 | −3.32997 | −4.996814 |
| PCTDC_482 | −1.332372 | −5.460417 | −2.407066 | −3.417602 | −5.091409 |
| PCTDC_483 | −2.9404 | −3.102393 | −1.634451 | −1.067689 | 1.100071 |
| PCTDC_484 | −1.224315 | −2.444646 | −2.167004 | −2.873597 | −4.347968 |
| PCTDC_485 | −1.956571 | −3.849904 | −2.381093 | −3.594158 | −3.283784 |
| PCTDC_486 | −1.156493 | −2.355411 | −2.087242 | −2.743011 | −2.741241 |
| PCTDC_487 | −1.089697 | −2.300259 | −1.924453 | −2.163176 | −2.667205 |
| PCTDC_488 | −1.21457 | −2.370535 | −2.094783 | −2.922597 | −4.340714 |
| PCTDC_489 | −4.917046 | −8.368398 | −4.67966 | −5.141819 | −3.87472 |
| PCTDC_490 | −2.486346 | −1.86256 | −1.67286 | −1.805379 | −1.350162 |
| PCTDC_491 | −1.42621 | −2.36949 | −1.819114 | −2.279974 | −3.299198 |
| PCTDC_492 | −2.250829 | −13.135315 | −8.658033 | −10.866399 | −11.625659 |
| PCTDC_493 | 1.001932 | −4.354498 | −1.930646 | −2.972657 | −5.828303 |
| PCTDC_494 | −4.708869 | −8.360419 | −5.433639 | −11.695395 | −7.803391 |
| PCTDC_495 | −6.488033 | −15.314687 | −6.099616 | −10.37993 | −5.293031 |
| PCTDC_496 | −1.691502 | −3.558874 | −4.366205 | −3.123582 | −3.897883 |
| PCTDC_497 | −3.464158 | −3.641393 | −9.802439 | −3.830014 | −6.246689 |
| PCTDC_498 | −1.79345 | −2.961699 | −2.436046 | −1.53983 | 1.072635 |
| PCTDC_499 | −3.888875 | −3.158231 | −12.658903 | −3.36037 | −7.937511 |
| PCTDC_500 | −3.521348 | −3.002847 | −10.687489 | −3.434129 | −7.020942 |
| PCTDC_501 | −1.868472 | −3.872467 | −2.818968 | −2.871452 | −4.185874 |
| PCTDC_502 | −2.307466 | 1.134177 | −1.232951 | −1.094307 | −1.509788 |
| PCTDC_503 | −1.379813 | −2.539931 | −1.973483 | −2.806978 | −2.619855 |
| PCTDC_504 | −2.9028 | −2.780434 | −6.381547 | −3.298102 | −5.283781 |
| PCTDC_505 | −4.801282 | −11.344074 | −5.839832 | −10.373031 | −5.292884 |
| PCTDC_506 | −1.191914 | −2.479965 | −2.444037 | −2.647597 | −2.140528 |
| PCTDC_507 | −4.26957 | −3.998628 | −20.232414 | −11.585198 | −12.86114 |
| PCTDC_508 | −1.914974 | −4.588605 | −2.526306 | −4.673424 | −3.409321 |
| PCTDC_509 | −3.287681 | −9.000772 | 4.655367 | −13.595597 | −4.621663 |
| PCTDC_510 | −1.287828 | −3.334848 | −3.086293 | −4.46172 | −3.106186 |
| PCTDC_511 | −1.546756 | −3.090829 | −2.238058 | −2.172862 | −2.05809 |
| PCTDC_512 | −3.542684 | −3.158082 | −12.497798 | −24.719374 | −4.924631 |
| PCTDC_513 | −4.163492 | −4.528132 | −23.560839 | −88.310661 | −9.291848 |
| PCTDC_514 | −3.902461 | −3.665555 | −20.874205 | −74.998177 | −6.763952 |
| PCTDC_515 | −2.058109 | −7.408581 | −2.21213 | −3.995366 | −3.363424 |
| PCTDC_516 | −1.330293 | −2.353537 | −2.324155 | −2.567971 | −2.820413 |
| PCTDC_517 | −2.037686 | −4.844729 | −2.684412 | −2.387803 | −2.425425 |
| PCTDC_518 | −2.044653 | −5.675608 | −2.003303 | −5.242962 | −5.370054 |
| PCTDC_519 | −10.524405 | −26.187635 | −12.124947 | −8.147792 | −19.470036 |
| PCTDC_520 | −2.032907 | −3.105246 | 1.947639 | −3.280555 | −2.722996 |
| PCTDC_521 | −2.104322 | −2.855173 | −4.322774 | −2.842998 | −5.603982 |
| PCTDC_522 | −1.117974 | −3.012714 | −2.165339 | −3.430023 | −4.755522 |
| PCTDC_523 | −2.291559 | −3.577276 | −2.483721 | −2.613158 | −2.39375 |
| PCTDC_524 | −3.104864 | −2.932681 | −5.816575 | −2.131141 | −2.879459 |
| PCTDC_525 | −2.59016 | −2.453159 | −1.29434 | −4.881182 | −2.744209 |
| PCTDC_526 | −1.186716 | −2.263018 | −2.14326 | −2.677976 | −4.123821 |
| PCTDC_527 | −3.758474 | −3.695833 | −11.288051 | −6.075418 | −6.068587 |
| PCTDC_528 | −1.392221 | −2.307213 | −2.355418 | −2.664037 | −1.883761 |
| PCTDC_529 | −3.404735 | −3.16146 | −9.616374 | −3.619349 | −6.840977 |
| PCTDC_530 | −1.291287 | −4.9881 | −2.314329 | −2.677203 | −6.71598 |
| PCTDC_531 | −1.167032 | −4.373553 | −2.174679 | −2.273024 | −6.779548 |
| PCTDC_532 | −1.769813 | −2.953695 | −3.218176 | −2.363033 | −2.318671 |
| PCTDC_533 | −2.571501 | −4.802047 | −3.536669 | −3.118577 | −2.818208 |
| PCTDC_534 | −1.273614 | −1.930238 | −1.540489 | −2.00633 | −2.243512 |
| PCTDC_535 | −1.55068 | −2.843627 | −2.637512 | −3.457897 | −3.254817 |
| PCTDC_536 | −1.305724 | −2.593612 | −2.25954 | −1.919988 | −2.160357 |
| PCTDC_537 | −4.299753 | −3.52406 | −19.381191 | −3.533262 | −10.068835 |
| PCTDC_538 | −1.352274 | −3.180976 | −2.307213 | −3.092135 | −3.120386 |
| PCTDC_539 | −1.645554 | −7.03511 | −6.858676 | −2.140382 | −6.644153 |
| PCTDC_540 | −1.500036 | −3.543043 | −2.433013 | −2.404769 | −1.862214 |
| PCTDC_541 | −2.316446 | −4.198337 | −3.335201 | −3.99356 | −3.080166 |
| PCTDC_542 | −2.981153 | −2.738776 | −6.353964 | −2.783772 | −4.630699 |
| PCTDC_543 | −1.82209 | −3.629715 | −2.379959 | −3.298835 | −3.24351 |
| PCTDC_544 | −3.161205 | −7.419415 | −4.592446 | −6.918106 | −6.446481 |
| PCTDC_545 | −2.349786 | −4.703971 | −3.517354 | −2.734774 | −2.279695 |
| PCTDC_546 | −4.128414 | −5.972315 | −6.127929 | −7.578036 | −5.788638 |
| PCTDC_547 | −1.716096 | −2.021892 | −1.823375 | −1.964153 | −1.837394 |
| PCTDC_548 | −2.282952 | −1.362833 | −2.893267 | −1.174093 | −2.488058 |
| PCTDC_549 | −1.267364 | −2.617886 | −2.139586 | −3.319463 | −2.148385 |
| PCTDC_550 | −3.298179 | −2.67091 | −6.901036 | −3.05029 | −6.368939 |
| PCTDC_551 | −1.616773 | −3.305795 | −1.547398 | −3.197367 | −3.784653 |
| PCTDC_552 | −1.677305 | −3.195515 | −2.50823 | −2.247194 | −2.804085 |
| PCTDC_553 | −1.56604 | −2.19495 | −2.009058 | −1.910682 | −2.605141 |
| PCTDC_554 | −1.314985 | −2.044226 | −2.369961 | −2.089493 | −1.931527 |
| PCTDC_555 | −3.648843 | −7.010541 | −5.203244 | −6.406971 | −5.155677 |
| PCTDC_556 | −4.482344 | −5.974912 | −4.990507 | −4.360383 | −3.330212 |
| PCTDC_557 | −5.09733 | −4.356937 | −15.4079 | −22.830832 | −12.213466 |
| PCTDC_558 | −1.879507 | −3.64272 | −2.36905 | −3.298157 | −3.581275 |
| PCTDC_559 | −1.201338 | −4.644512 | −2.458729 | −1.756415 | −4.717901 |
| PCTDC_560 | −2.377509 | −4.225865 | −3.607449 | −3.226445 | −3.282101 |
| PCTDC_561 | −12.009212 | −30.645575 | −10.47272 | −14.096417 | −9.249123 |
| PCTDC_562 | 1.116945 | −3.024733 | −1.926901 | −1.925363 | −2.04705 |
| PCTDC_563 | −1.095156 | −3.6972 | −2.891324 | −3.374032 | −2.836388 |
| PCTDC_564 | −2.084297 | −4.547463 | −3.041965 | −3.241731 | −3.54576 |
| PCTDC_565 | −1.825188 | −2.484365 | −1.917063 | −1.932943 | −1.893031 |
| PCTDC_566 | −1.18682 | −2.648138 | −1.998425 | −2.664293 | −4.492978 |
| PCTDC_567 | −1.59086 | −2.869549 | −2.669139 | −2.646847 | −2.239221 |
| PCTDC_568 | −1.414268 | −2.792088 | −1.331242 | −3.16828 | −3.233897 |
| PCTDC_569 | −2.230147 | −1.457797 | 1.069658 | −1.722803 | −2.220284 |
| PCTDC_570 | −6.931448 | −44.141563 | −11.76804 | −19.895657 | −37.167835 |
| PCTDC_571 | −1.873176 | −2.435471 | −2.313335 | −3.99035 | −6.524507 |
| PCTDC_572 | −1.225797 | −3.97152 | −1.70684 | −3.714783 | −4.567413 |

### Example 6

[0674] Signal P Analysis and TMHMM Analysis

[0675] Transcripts that were differentially expressed greater than 2 fold and in 30% or more of the tumors were further analyzed by Signal P and TMHMM analysis to determine if they were membrane associated.

[0676] Signal Sequence and TMHMM Analysis

[0677] SignalP V2.0 comprises two signal peptide prediction methods, SignalP-NN (based on neural networks, corresponding to SignalP V1.1) and SignalP-HMM (based on a hidden Markov model). For eukaryotic data, SignalP-HMM has been shown to have substantially improved discrimination between signal peptides and uncleaved signal anchors, but it has a slightly lower accuracy in predicting the precise location of the cleavage site (Nielsen and Krogh, In Proceedings of the Sixth International Conference on Intelligent Systems for Molecular Biology, (1998). AAAI Press, Menlo Park, Calif., pp. 122-130). Since in all proteins examined, the predicted site of signal cleavage was exactly the same for both programs only the results of SignalP-HMM program are shown. TMHMM is membrane protein topology prediction program based on a HMM. This program has been shown to correctly predict 97-98% of the transmembrane helices (Krogh et al., J Mol Bio, 305:567-580(2001).). Additionally, TMHMM can discriminate between soluble and membrane proteins with both a greater than 99% specificity and sensitivity.

[0678] FIGS. 1-31 shows the SignalP and TMHMM analysis of the protein sequences of PCTUC-5 (SEQ ID NO:39), PCTUC-93 (SEQ ID NO:46), PCTUC-190 (SEQ ID NO:57), PCTUC-239 (SEQ ID NO:65), PCTUC-246 (SEQ ID NO:40), PCTUC-360 (SEQ ID NO:53), PCTUC-462 (SEQ ID NO:58), PCTUC-468 (SEQ ID NO:48), PCTUC-536 (SEQ ID NO:3114), PCTUC-582 (SEQ ID NO:64), PCTUC-605 (SEQ ID NO:71), PCTUC-629 (SEQ ID NO:67), PCTUC-722 (SEQ ID NO:61), PCTUC-748 (SEQ ID NO:63), PCTUC-784 (SEQ ID NO:72), PCTUC-812 (SEQ ID NO:66), PCTUC-856 (SEQ ID NO:49), PCTUC-898 (SEQ ID NO:43), PCTUC-935 (SEQ ID NO:70), PCTUC-936 (SEQ ID NO:42), PCTUC-986 (SEQ ID NO:47), PCTUC-991 (SEQ ID NO:75), PCTUC-992 (SEQ ID NO:60), PCTUC-1054 (SEQ ID NO:59), PCTUC-1061 (SEQ ID NO:55), PCTUC-1073 (SEQ ID NO:56), PCTUC-1075 (SEQ ID NO:73), PCTUC-1078 (SEQ ID NO:68), PCTUC-1082 (SEQ ID NO:54), PCTUC-1122 (SEQ ID NO:62), and PCTUC-250 (SEQ ID NO:41) respectively. The predictions of the SignalP and TMHMM analyses for subcellular localization and membrane topology of these peptides are summarized in Table 5.

TABLE 5

| | | Cleaved | | Number of |
|---|---|---|---|---|
| | Product | Signal | | TM |
| Gene | Location | Sequence | Topology | Segments |
| PCTUC5 | plasma | yes | N-terminus | 1 |
| | membrane | | outside & | |
| | | | C-terminus | |
| | | | inside | |
| PCTUC93 | secreted | yes | N-terminus | 0 |
| | | | outside & | |
| | | | C-terminus | |
| | | | outside | |
| PCTUC190 | plasma | NA | N-terminus | 11 |
| | membrane | | inside & | |
| | | | C-terminus | |
| | | | outside | |
| PCTUC239 | secreted | yes | N-terminus | 0 |
| | | | outside & | |
| | | | C-terminus | |
| | | | outside | |
| PCTUC246 | plasma | yes | N-terminus | 1 |
| | membrane | | outside & | |
| | | | C-terminus | |
| | | | inside | |
| PCTCUC250 | Plasma | yes | N-terminus | 7 |
| | membrane | | inside & | |
| | | | C-terminus | |
| | | | inside | |
| PCTUC360 | plasma | NA | N-terminus | 6 |
| | membrane | | inside & | |
| | | | C-terminus | |
| | | | inside | |
| PCTUC462 | plasma | NA | N-terminus | 12 |
| | membrane | | outside & | |
| | | | C-terminus | |
| | | | outside | |
| PCTUC468 | plasma | yes | N-terminus | 1 |
| | membrane | | outside & | |
| | | | C-terminus | |
| | | | inside | |
| PCTUC536 | plasma | no | N-terminus | 4 |
| | membrane | | outside & | |
| | | | C-terminus | |
| | | | outside | |
| PCTUC582 | secreted | yes | N-terminus | 0 |
| | | | outside & | |
| | | | C-terminus | |
| | | | outside | |
| PCTUC605 | plasma | yes | N-terminus | 1 |
| | membrane | | outside & | |
| | | | C-terminus | |
| | | | inside | |
| PCTUC629 | plasma | NA | N-terminus | 12 |
| | membrane | | inside & | |
| | | | C-terminus | |
| | | | inside | |
| PCTUC722 | secreted | yes | N-terminus | 0 |
| | | | outside & | |
| | | | C-terminus | |
| | | | outside | |
| PCTUC748 | plasma | no | N-terminus | 4 |
| | membrane | | inside & | |
| | | | C-terminus | |
| | | | inside | |
| PCTUC784 | plasma | yes | N-terminus | 1 |
| | membrane | | outside & | |
| | | | C-terminus | |
| | | | inside | |
| PCTUC812 | plasma | yes | N-terminus | 1 |
| | membrane | | outside & | |
| | | | C-terminus | |
| | | | inside | |
| PCTUC856 | plasma | no | N-terminus | 12 |
| | membrane | | inside & | |
| | | | C-terminus | |
| | | | inside | |
| PCTUC898 | plasma | no | N-terminus | 10 |
| | membrane | | outside & | |
| | | | C-terminus | |
| | | | inside | |
| PCTUC935 | plasma | no | N-terminus | 6 |
| | membrane | | inside & | |
| | | | C-terminus | |
| | | | inside | |
| PCTUC936 | plasma | yes | N-terminus | 1 |
| | membrane | | outside & | |
| | | | C-terminus | |
| | | | inside | |
| PCTUC986 | plasma | yes | N-terminus | 3 |
| | membrane | | outside & | |
| | | | C-terminus | |
| | | | inside | |
| PCTUC991 | secreted | yes | N-terminus | 0 |
| | | | outside & | |
| | | | C-terminus | |
| | | | outside | |
| PCTUC992 | plasma | NA | N-terminus | 9 |
| | membrane | | outside & | |
| | | | C-terminus | |
| | | | inside | |
| PCTUC1054 | plasma | yes | N-terminus | 1 |
| | membrane | | outside & | |
| | | | C-terminus | |
| | | | inside | |
| PCTUC1061 | plasma | NA | N-terminus | 2 |
| | membrane | | outside & | |
| | | | C-terminus | |
| | | | outside | |
| PCTUC1073 | secreted | yes | N-terminus | 0 |
| | | | outside & | |
| | | | C-terminus | |
| | | | outside | |
| PCTUC1075 | plasma | NA | N-terminus | 12 |
| | membrane | | inside & | |
| | | | C-terminus | |
| | | | inside | |
| PCTUC1078 | secreted | yes | N-terminus | 0 |
| | | | outside & | |
| | | | C-terminus | |
| | | | outside | |
| PCTUC1082 | plasma | yes | N-terminus | 3 |
| | membrane | | inside & | |
| | | | C-terminus | |
| | | | outside | |
| PCTUC1122 | plasma | yes | N-terminus | 1 |
| | membrane | | outside & | |
| | | | C-terminus | |
| | | | inside | |

NA = not applicable (N-terminal signal sequence independent membrane insertion)

### Example 7

[0679] SYBR Green PCR Analysis of the Time Dependence of Expression of Cell Surface Associated Genes.

[0680] Where possible microarray results were confirmed using the SYBR green procedure. The SYBR green PCR procedure is a way to perform real-time PCR using the SYBR Green 1 Dye. Direct detection of polymerase chain reaction (PCR) product is monitored by measuring the increase in fluorescence caused by the binding of SYBR green dye to double stranded DNA. Gene specific PCR oligonucleotide primer pairs were designed using the Primer Express 1.5 software. (Applied Biosystems, Foster City, Calif.)

[0681] The transcripts whose protein products were determined to be associated with the membrane were then further validated by SYBR green (real time PCR) analysis on an additional set of either 6 or 13 colon and 6 breast tumor RNA's and were compared to a pool of normal colon or breast RNA. First one microgram of each mRNA was added to 100 uL of a reverse transcriptase reaction using the ABI Taqman reverse transcription reagents with random hexamers according to the manufacturers protocol (Applied Biosystems, Foster City, Calif.) The thermal cycling conditions included 1 cycle at 25° C. for 10 minutes, 1 cycle at 48° C. for 30 minutes and 1 cycle at 95° C. for 5 minutes. Four hundred microliters of water was then added to the cDNA reaction. The cDNA (10 uL) that was generated was added to a 25 uL SYBR green PCR reaction mixture according to the manufactures protocol. (Applied Biosystems, Foster City, Calif.) The thermal cycling conditions included 1 cycle at 95° C. for ten minutes, 40 cycles at 95° C. for 15 s, annealing at 60° C. for 1 minute. Data is expressed as the fold increase normalized to the same gene using the delta delta CT method for relative quantitation. For comparison data obtained with cDNA from colon and breast tumors were compared to data from pools of normal colon and breast cDNA.

[0682] Table 6 shows the SYBR green primers and probe sets used. Table 7 shows the shows the SYBR green in results in the colon tumors (CT) and breast tumors (BT). ND=non-detectable

TABLE 6

| PCTUC | Forward Primer | Reverse Primer |
|---|---|---|
| 5 | CGGAGACAGGCTATGAGTCTGA | TGAAGTCAAACTGCCACATTC |
| | SEQ ID NO: 3012 | SEQ ID NO: 3048 |
| 246 | GCCAGCAACCTACATGAACTTG | TGAGAACTGCGGCTGTTCTG |
| | SEQ ID NO: 3013 | SEQ ID NO: 3049 |
| 250 | CGACATGCTGGGAGATTACATC | AGAGGCTTTGTCACTCAGCAAGA |
| | SEQ ID NO: 3014 | SEQ ID NO: 3050 |
| 936 | TGAGTCTGGGCAGCTGTCC | CTGGACTGCTACCTTTCAAAGCTT |
| | SEQ ID NO: 3015 | SEQ ID NO: 3051 |
| 898 | CATCAGGTTGGAGTGCGTCTT | CGAGGCGATGACATAGTTCACA |
| | SEQ ID NO: 3016 | SEQ ID NO: 3052 |
| 1121 | GGATCAGCCCTGAACTCACT | TTGTCCCTGTCCCTCTCTCT |
| | SEQ ID NO: 3017 | SEQ ID NO: 3053 |
| 1103 | AGACAAGGATGCCGTGGATAA | TGAAGTCCACCTGGGCATCT |
| | SEQ ID NO: 3018 | SEQ ID NO: 3054 |
| 93 | TCAATATAGATGATTGTGCCATCTTCT | CACGTTTATGAGTTGAACTTCTC |
| | SEQ ID NO: 3019 | SEQ ID NO: 3055 |
| 986 | TGCAAAGTCTTTGACTCCTTGCT | TCAAGGCACGGGTTGCTT |
| | SEQ ID NO: 3020 | SEQ ID NO: 3056 |
| 468 | GTCCAAAGAGTTACTTGCAACAGTCT | ATTAGTAAACATTTTGTCATGCAGCAT |
| | SEQ ID NO: 3021 | SEQ ID NO: 3057 |
| 856 | GGCATGGTTTAGGCCCTGTT | TGGCTCTAGGTGTCCACTAAAGG |
| | SEQ ID NO: 3022 | SEQ ID NO: 3058 |
| 536 | CCAAGATGCAGAGGTTGATGAA | TCGTCTCAGGCTTCCTGCTT |
| | SEQ ID NO: 3023 | SEQ ID NO: 3059 |
| 360 | CCGTTTATGGGTAGACATCTTTGG | TGTTGGAGTATACGTGTGGACATG |
| | SEQ ID NO: 3024 | SEQ ID NO: 3060 |
| 1082 | GCCATGCCAGCCTTTCTGT | GCAATGAGCTAAGAGCCAACCT |
| | SEQ ID NO: 3025 | SEQ ID NO: 3061 |
| 1061 | AGCTAGAAGGGCTGGAGAATGC | GAACGTCCTGTTGCGAGTCTT |
| | SEQ ID NO: 3026 | SEQ ID NO: 3062 |
| 1073 | GGTACAAATTATTTGGCTCGACTTC | CACTCTGGCAACGGGTCACT |
| | SEQ ID NO: 3027 | SEQ ID NO: 3063 |
| 190 | TGATGCAATCACACGGGAACT | GAGGTCACAGCCGACTTTAAACC |
| | SEQ ID NO: 3028 | SEQ ID NO: 3064 |
| 462 | CATGGCATGGTTAGAAGCTCTATCT | ACACTCTGATGATTCCCACGAACTA |
| | SEQ ID NO: 3029 | SEQ ID NO: 3065 |
| 1054 | CGTTCTCTCCATTGCTTGTTAGC | CACAGGACAGGGATGGAGAAG |
| | SEQ ID NO: 3030 | SEQ ID NO: 3066 |
| 992 | TCAAGGGAGCCAAGAGCTCTT | TTGACAGTGTGTTTATGTGGAATGTT |
| | SEQ ID NO: 3031 | SEQ ID NO: 3067 |
| 722 | GACAGCAAGGTGCCCTCAGT | GTAGGCGCACACCTTCATCTC |
| | SEQ ID NO: 3032 | SEQ ID NO: 3068 |
| 1122 | TGTCTGCGAAGAAGGCTAGGAG | ATGGACTGAAGCTGTTGTTGCC |
| | SEQ ID NO: 3033 | SEQ ID NO: 3069 |
| 748 | TCAAGATCCGTGCTCGCAGT | GGGATACAGGGTTTCAACGA |
| | SEQ ID NO: 3034 | SEQ ID NO: 3070 |
| 582 | GTTCAGCGTACATCCGGAGACT | TGACCATTTACCCACCACAGGT |
| | SEQ ID NO: 3035 | SEQ ID NO: 3071 |
| 239 | TTGTCATCCGTCTTCTGAC | GTGGGCACCTTTGATTCCT |
| | SEQ ID NO: 3036 | SEQ ID NO: 3072 |
| 812 | CGTAAGCAGTATGGCTCCAA | AGCACCTCCTGCTTGCTTAT |
| | SEQ ID NO: 3037 | SEQ ID NO: 3073 |
| 629 | ACCCAAACTCCACAAAGCCATT | GCCAGGATGAACACGTACATGTA |
| | SEQ ID NO: 3038 | SEQ ID NO: 3074 |
| 1078 | CCCTTCCAAGTAAGTCCAACGA | TGTCAGGTCTGCGAAACTTCTT |
| | SEQ ID NO: 3039 | SEQ ID NO: 3075 |
| 1124 | GACAGTCACAGCAGCCTTGACA | TGAACGGCGTGGATTCAATA |
| | SEQ ID NO: 3040 | SEQ ID NO: 3076 |
| 935 | TGCAGATCCTGAGGATGCTAC | TCCTTCTCAGCCAGGTACACAA |
| | SEQ ID NO: 3041 | SEQ ID NO: 3077 |
| 605 | GTGGAGGACAGAAAGCCAAGTG | GCACCATTTCCTGAGACTTGCT |
| | SEQ ID NO: 3042 | SEQ ID NO: 3078 |
| 784 | TGGCTCTCGGTTTCTCTGCTT | CGCGGAAGACGCTGTTATT |
| | SEQ ID NO: 3043 | SEQ ID NO: 3079 |
| 1075 | TGGCTTGATCAAGGGCCTTA | TGGTCACGTTTCGGTTTCAT |
| | SEQ ID NO: 3044 | SEQ ID NO: 3080 |
| 1125 | AGAAGAGCTGCCAGGAAGTGTT | TCCACATGACCAGACTCTCCA |
| | SEQ ID NO: 3045 | SEQ ID NO: 3081 |
| 991 | TGGAAAACAGCAAACCACCTT | CAGAGCAGATGCCAAGCCTAA |
| | SEQ ID NO: 3046 | SEQ ID NO: 3082 |
| 1126 | TTCTGAGGCATTAAGCCAGCA | TGCATGGAGTTGCTGCTGT |
| | SEQ ID NO: 3047 | SEQ ID NO: 3083 |

[0683] TABLE 7

| PCTUC | CT-1 | CT-2 | CT-3 | CT-4 | CT-5 | CT-6 | CT-7 | CT-8 | CT-9 | CT-10 |
|---|---|---|---|---|---|---|---|---|---|---|
| 5 | 49.3 | 0.0 | 67.2 | 12.5 | 83.0 | 74.6 | | | | |
| 246 | 2.6 | 0.0 | 2.3 | 1.0 | 25.7 | 2.7 | | | | |
| 250 | 3.4 | 0.0 | 7.8 | 2.3 | 0.8 | 3.5 | | | | |
| 936 | 252.4 | 5.5 | 3.9 | 2.7 | 89.1 | 5.2 | | | | |
| 898 | 4.8 | 1.5 | 5.3 | 2.7 | 4.9 | 7.1 | | | | |
| 1121 | 4.2 | 6.9 | 5.8 | 2.8 | 24.3 | 12.6 | | | | |
| 1103 | 5.4 | 1.1 | 1.9 | 3.0 | 5.9 | 5.8 | | | | |
| 93 | 0.6 | 0.1 | 1.2 | 0.4 | 0.2 | 0.8 | | | | |
| 986 | 27.8 | 31.3 | 17.5 | 11.0 | 3.5 | 16.6 | | | | |
| 468 | ND | ND | ND | ND | ND | ND | | | | |
| 856 | 3.4 | 5.2 | 1.8 | 1.6 | 4.8 | 5.8 | | | | |
| 536 | 2.2 | 2.5 | 2.9 | 1.7 | 1.7 | 1.9 | 11.0 | 7.5 | 5.7 | 5.2 |
| 360 | 1.2 | 1.4 | 1.7 | 0.4 | 1.6 | 1.2 | | | | |
| 1082 | 1.7 | 2.6 | 65.8 | 0.4 | 16.1 | 1.7 | | | | |
| 1061 | 1.6 | 1.5 | 2.2 | 0.8 | 1.0 | 1.7 | 1.4 | 4.6 | 1.6 | 0.6 |
| 1073 | 3.3 | 4.6 | 1.9 | 0.7 | 0.6 | 1.0 | | | | |
| 190 | 16.9 | 8.0 | 9.8 | 4.7 | 12.4 | 9.6 | | | | |
| 462 | 1.9 | 1.9 | 3.7 | 0.9 | 1.0 | 1.6 | | | | |
| 1054 | ND | ND | ND | ND | ND | ND | | | | |
| 992 | ND | ND | ND | ND | ND | ND | | | | |
| 722 | 1.9 | 3.5 | 2.4 | 0.6 | 1.0 | 1.2 | | | | |
| 1122 | 1.1 | 1.7 | 0.7 | 0.4 | 0.4 | 0.6 | 0.5 | 0.6 | 1.2 | 0.7 |
| 748 | 0.8 | 0.3 | 2.1 | 0.5 | 0.3 | 1.3 | 11.4 | 14.3 | 2.1 | 13.4 |
| 582 | 3.9 | 0.2 | 0.7 | 1.0 | 1.1 | 2.3 | | | | |
| 239 | 19.4 | 0.0 | 7.9 | 37.9 | 7.0 | 8.6 | | | | |
| 812 | 0.3 | 0.0 | 0.2 | 0.1 | 0.3 | 0.3 | | | | |
| 629 | 2.8 | 0.0 | 3.4 | 2.2 | 2.7 | 2.8 | | | | |
| 1078 | 16.0 | 5.6 | 4.0 | 0.7 | 0.2 | 0.9 | | | | |
| 1124 | 4.1 | 0.1 | 2.1 | 1.3 | 0.1 | 0.7 | | | | |
| 935 | 3.2 | 2.3 | 7.7 | 0.9 | 0.2 | 2.0 | | | | |
| 605 | 1.8 | 1.7 | 3.0 | 1.0 | 1.5 | 2.2 | | | | |
| 784 | 1.5 | 0.9 | 2.7 | 0.7 | 0.2 | 0.8 | 2.4 | 5.0 | 3.4 | 2.5 |
| 1075 | 1.7 | 0.4 | 4.4 | 0.5 | 0.2 | 2.0 | | | | |
| 1125 | 1.1 | 0.9 | 2.1 | 0.7 | 0.4 | 1.7 | 2.7 | 3.9 | 3.5 | 5.2 |
| 991 | 1.8 | 1.4 | 1.3 | 0.7 | 0.2 | 0.5 | 3.7 | 10.1 | 5.2 | 11.0 |
| 1126 | 4.0 | 7.8 | 1.7 | 4.5 | 24.2 | 4.8 | | | | |

| PCTUC | CT-11 | CT-12 | CT-13 | BT-1 | BT-2 | BT-3 | BT-4 | BT-5 | BT-6 |
|---|---|---|---|---|---|---|---|---|---|
| 5 | | | | 1.8 | 0.3 | 0.5 | 0.4 | 1.4 | 2.4 |
| 246 | | | | 3.8 | 2.8 | 4.4 | 8.9 | 8.1 | 2.8 |
| 250 | | | | 0.7 | 0.4 | 0.5 | 0.4 | 0.7 | 0.5 |
| 936 | | | | 0.1 | 0.1 | 0.6 | 68.1 | 15.7 | 2.5 |
| 898 | | | | 0.9 | 0.7 | 1.3 | 0.8 | 1.7 | 0.6 |
| 1121 | | | | 2.1 | 0.9 | 0.6 | 5.5 | 4.4 | 0.9 |
| 1103 | | | | 8.1 | 22.5 | 2.9 | 19.4 | 33.6 | 29.3 |
| 93 | | | | 1.0 | 0.7 | 2.1 | 1.3 | 7.9 | 0.4 |
| 986 | | | | 1.1 | 0.1 | 0.5 | 0.1 | 0.2 | 0.7 |
| 468 | | | | ND | ND | ND | ND | ND | ND |
| 856 | | | | 0.8 | 0.3 | 0.1 | 0.1 | 0.3 | 0.7 |
| 536 | 4.8 | 6.9 | 1.0 | 1.8 | 1.4 | 1.9 | 4.0 | 9.3 | 1.4 |
| 360 | | | | 1.6 | 0.7 | 1.7 | 0.6 | 1.0 | 0.0 |
| 1082 | | | | 0.3 | 0.2 | 0.0 | 0.4 | 1.4 | 0.6 |
| 1061 | 0.4 | 1.5 | 1.0 | 0.7 | 0.6 | 1.2 | 1.0 | 1.1 | 0.5 |
| 1073 | | | | 1.0 | 0.8 | 1.9 | 1.1 | 3.4 | 0.7 |
| 190 | | | | 0.6 | 0.4 | 0.2 | 0.7 | 2.3 | 2.3 |
| 462 | | | | 0.4 | 0.2 | 1.5 | 0.3 | 1.1 | 0.1 |
| 1054 | | | | 2.5 | 4.5 | 8.9 | 0.0 | 8.0 | 4.1 |
| 992 | | | | ND | ND | ND | ND | ND | ND |
| 722 | | | | 0.9 | 0.4 | 0.7 | 0.7 | 0.6 | 0.4 |
| 1122 | 0.8 | 0.6 | 0.9 | 0.3 | 0.4 | 0.3 | 0.2 | 0.3 | 0.2 |
| 748 | 1.5 | 15.6 | 3.5 | 0.6 | 0.2 | 0.3 | 0.5 | 0.9 | 0.4 |
| 582 | | | | 12.6 | 28.2 | 12.5 | 3.0 | 4.2 | 3.2 |
| 239 | | | | 2.6 | 68.8 | 11.4 | 217.8 | 9.3 | 4.8 |
| 812 | | | | 0.1 | 0.1 | 0.1 | 0.0 | 0.2 | 0.1 |
| 629 | | | | 2.1 | 2.8 | 3.6 | 5.7 | 3.7 | 1.3 |
| 1078 | | | | 4.1 | 1.7 | 0.6 | 1.3 | 8.2 | 5.1 |
| 1124 | | | | 0.7 | 3.6 | 0.5 | 9.2 | 5.7 | 0.2 |
| 935 | | | | 0.8 | 0.6 | 0.3 | 0.3 | 0.8 | 0.3 |
| 605 | | | | 1.5 | 0.7 | 1.4 | 1.4 | 6.6 | 0.9 |
| 784 | 0.9 | 3.8 | 5.4 | 0.6 | 0.4 | 2.7 | 0.2 | 0.7 | 0.2 |
| 1075 | | | | 1.6 | 2.0 | 2.7 | 0.2 | 1.9 | 0.4 |
| 1125 | 1.0 | 4.0 | 3.4 | 1.2 | 1.5 | 0.6 | 2.4 | 3.2 | 1.7 |
| 991 | 5.1 | 2.3 | 2.7 | 1.6 | 0.6 | 2.3 | 0.4 | 3.5 | 0.6 |
| 1126 | | | | 1.8 | 2.3 | 3.8 | 10.1 | 6.7 | 0.8 |

### Example 8

[0684] Gene Expression in E. coli

[0685] This example illustrates preparation of an unglycosylated form of polypeptide by recombinant expression in E. coli.

[0686] The DNA sequence encoding polypeptide is initially amplified using selected PCR primers. The primers should contain restriction enzyme sites that correspond to the restriction enzyme sites on the selected expression vector. A variety of expression vectors can be employed. An example of a suitable vector is pBR322 (derived from E. coli; see Bolivar et al., Gene, 2:95 (1977)) that contains genes for ampicillin and tetracycline resistance. The vector is digested with restriction enzyme and dephosphorylated. The PCR amplified sequences are then ligated into the vector. The vector will preferably include sequences, which encode for an antibiotic resistance gene, a trp promoter, a polyhis leader (including the first six STII codons, polyhis sequence, and enterokinase cleavage site), the region encoding a protein of the present invention, lambda transcriptional terminator, and an argU gene.

[0687] The ligation mixture is then used to transform a selected E. coli strain using the methods described in Sambrook et al., supra. Transformants are identified by their ability to grow on LB plates and antibiotic resistant colonies are then selected. Plasmid DNA can be isolated and confirmed by restriction analysis and DNA sequencing.

[0688] Selected clones can be grown overnight in liquid culture medium such as LB broth supplemented with antibiotics. The overnight culture can subsequently be used to inoculate a larger scale culture. The cells are then grown to a desired optical density, during which the expression promoter is turned on.

[0689] After culturing the cells for several more hours, the cells can be harvested by centrifugation. The cell pellet obtained by the centrifugation can be solubilized using various agents known in the art, and the solubilized protein can then be purified using a metal chelating column under conditions that allow tight binding of the protein.

[0690] Proteins of the present invention can be expressed in E. coli in a poly-His tagged form, using the following procedure. The DNA encoding a protein of the present invention is initially amplified using selected PCR primers. The primers will contain restriction enzyme sites which correspond to the restriction enzyme sites on the selected expression vector, and other useful sequences providing for efficient and reliable translation initiation, rapid purification on a metal chelation column, and proteolytic removal with enterokinase. The PCR-amplified, poly-His tagged sequences are then ligated into an expression vector, which is used to transform an E. coli host based on strain 52 (W3110 fuhA(tonA) lon galE rpoHts(htpRts) clpP(lacIq). Transformants are first grown in LB containing 50 mg/ml carbenicillin at 30° C. with shaking until an O.D.600 of 3-5 is reached. Cultures are then diluted 50-100 fold into CRAP media (prepared by mixing 3.57 g (NH₂)SO₄, 0.71 g sodium citrate-2H₂O, 1.07 g KCl, 5.36 g Difco yeast extract, 5.36 g Sheffield hycase SF in 500 mL water, as well as 110 mM MPOS, pH 7.3, 0.55% (w/v) glucose and 7 mM MgSO₄,) and grown for approximately 20-30 hours at 30° C. with shaking. Samples are removed to verify expression by SDS-PAGE analysis, and the bulk culture is centrifuged to pellet the cells. Cell pellets are frozen until purification and refolding.

[0691] E. coli paste from 0.5 to 1 L fermentations (6-10 g pellets) is resuspended in 10 volumes (w/v) in 7 M guanidine, 20 mM Tris, pH 8 buffer. Solid sodium sulfite and sodium tetrathionate is added to make final concentrations of 0.1 M and 0.02 M, respectively, and the solution is stirred overnight at 4° C. This step results in a denatured protein with all cysteine residues blocked by sulfitolization. The solution is centrifuged at 40,000 rpm in a Beckman Ultracentrifuge for 30 min. The supernatant is diluted with 3-5 volumes of metal chelate column buffer (6 M guanidine, 20 mM Tris, pH 7.4) and filtered through 0.22 micron filters to clarify. The clarified extract is loaded onto a 5 ml Qiagen Ni-NTA metal chelate column equilibrated in the metal chelate column buffer. The column is washed with additional buffer containing 50 mM imidazole (Calblochem, Utrol grade), pH 7.4. The protein is eluted with buffer containing 250 mM imidazole. Fractions containing the desired protein are pooled and stored at 4° C. Protein concentration is estimated by its absorbance at 280 nm using the calculated extinction coefficient based on its amino acid sequence.

[0692] The proteins are refolded by diluting the sample slowly into freshly prepared refolding buffer consisting of 20 mM Tris, pH 8.6, 0.3 M NaCl, 2.5 M urea, 5 mM cysteine, 20 mM glycine and 1 mM EDTA. Refolding volumes are chosen so that the final protein concentration is between 50 to 100 micrograms/ml. The refolding solution is stirred gently at 4° C. for 12-36 hours. The refolding reaction is quenched by the addition of TFA to a final concentration of 0.4% (pH of approximately 3). Before further purification of the protein, the solution is filtered through a 0.22 micron filter and acetonitrile is added to 2-10% final concentration. The refolded protein is chromatographed on a Poros R1/H reversed phase column using a mobile buffer of 0.1% TFA with elution with a gradient of acetonitrile from 10 to 80%. Aliquots of fractions with A280 absorbance are analyzed on SDS polyacrylamide gels and fractions containing homogeneous refolded protein are pooled. Generally, the properly refolded species of most proteins are eluted at the lowest concentrations of acetonitrile since those species are the most compact with their hydrophobic interiors shielded from interaction with the reversed phase resin. Aggregated species are usually eluted at higher acetonitrile concentrations. In addition to resolving misfolded forms of proteins from the desired form, the reversed phase step also removes endotoxin from the samples.

[0693] Fractions containing the desired folded polypeptide are pooled and the acetonitrile removed using a gentle stream of nitrogen directed at the solution. Proteins are formulated into 20 mM Hepes, pH 6.8 with 0.14 M sodium chloride and 4% mannitol by dialysis or by gel filtration using G25 Superfine (Pharmacia) resins equilibrated in the formulation buffer and sterile filtered.

### Example 9

[0694] Expression of Polypeptides in Mammalian Cells

[0695] This example illustrates preparation of a potentially glycosylated form of polypeptide by recombinant expression in mammalian cells.

[0696] The vector, pRK5 (see EP 307,247, published Mar. 15, 1989), is employed as the expression vector. Optionally, the DNA is ligated into pRK5 with selected restriction enzymes to allow insertion of the DNA using ligation methods such as described in Sambrook et al, supra., and is designated pRK5-DNA.

[0697] In one embodiment, the selected host cells can be NIH3T3 cells, using the vectors and transfection methods described herein for other mammalian cells. Transfected NIH3T3 cells, over-expressing gene encoding a protein of the present invention or expressing antisense, are tested for activity.

[0698] In one embodiment, the selected host cells can be 293 cells. Human 293 cells (ATCC CCL 1573) are grown to confluence in tissue culture plates in medium such as DMEM supplemented with fetal calf serum and optionally, nutrient components and/or antibiotics. About 10 μg pRK5-DNA is mixed with about 1 μg DNA encoding the VA RNA gene (Thimmappaya et al., Cell, 31:543 (1982)) and dissolved in 500 μl of 1 mM Tris-HCl, 0.1 mM EDTA, 0.227 M CaCl₂, To this mixture is added, dropwise, 500 μl of 50 mM HEPES (pH 7.35), 280 mM NaCl, 1.5 mM NaPO₄, and a precipitate is allowed to form for 10 minutes at 25° C. The precipitate is suspended and added to the 293 cells and allowed to settle for about four hours at 37° C. The culture medium is aspirated off and 2 ml of 20% glycerol in PBS is added for 30 seconds. The 293 cells are then washed with serum free medium, fresh medium is added, and the cells are incubated for about 5 days.

[0699] Approximately 24 hours after transfection, the culture medium is removed and replaced with culture medium (alone) or culture medium containing 200 μCi/ml ³⁵S-cysteine and 200 μCi/ml ³⁵S-methionine. After a 12-hour incubation, the conditioned medium is collected, concentrated on a spin filter, and loaded onto a 15% SDS gel. The processed gel can be dried and exposed to film for a selected period of time to reveal the presence of polypeptide. The cultures containing transfected cells can undergo further incubation (in serum free medium) and the medium is then tested in selected bioassays.

[0700] In an alternative technique, a protein of the present invention can be introduced into 293 cells transiently using the dextran sulfate method described by Somparyrac et al., Proc. Natl. Acad. Sci., 12:7575 (1981). 293 cells are grown to maximal density in a spinner flask and 700 μg pRK5-DNA is added. The cells are first concentrated from the spinner flask by centrifugation and washed with PBS. The DNA-dextran precipitate is incubated on the cell pellet for four hours. The cells are treated with 20% glycerol for 90 seconds, washed with tissue culture medium, and reintroduced into the spinner flask containing tissue culture medium, 5 μg/ml bovine insulin, and 0.1 μg/ml bovine transferrin. After about four days, the conditioned media is centrifuged and filtered to remove cells and debris. The sample containing expressed a protein of the present invention can then be concentrated and purified by any selected method, such as dialysis and/or column chromatography.

[0701] In another embodiment, a protein of the present invention can be expressed in CHO cells. The pRK5-DNA can be transfected into CHO cells using known reagents such as CaPO₄, or DEAE-dextran. As described above, the cell cultures can be incubated, and the medium replaced with culture medium (alone) or medium containing a radiolabel such as ³⁵S-methionine. After determining the presence of polypeptide, the culture medium can be replaced with serum free medium. Preferably, the cultures are incubated for about 6 days, and then the conditioned medium is harvested. The medium containing the expressed a protein of the present invention can then be concentrated and purified by any selected method.

[0702] Epitope-tagged polypeptide can also be expressed in host CHO cells. The DNA can be subcloned out of the pRK5 vector. The subclone insert can undergo PCR to fuse in frame with a selected epitope tag such as a poly-His tag or myc tag such as in pcDNA3.1/myc-his, (Invitrogen, Carlsbad, Calif.). This vector has the neo gene for selection of stable clones using G418 and the human cytomegalovirus promoter operationally linked to the genes of the present invention. Labeling can be performed, as described above, to verify expression. The culture medium containing the expressed poly-His tagged polypeptide can then be concentrated and purified by any selected method, such as by Ni²⁺-chelate affinity chromatography.

[0703] Protein of the present invention can also be expressed in CHO and/or COS cells by a transient expression procedure or in CHO cells by another stable expression procedure.

[0704] Stable expression in CHO cells is performed using the following procedure. The proteins are expressed as an IgG construct (immunoadhesin), in which the coding sequences for the soluble forms (e.g. extracellular domains) of the respective proteins are fused to an IgG1 constant region sequence containing the hinge, CH2 and CH2 domains and/or is a poly-His tagged form.

[0705] Following PCR amplification, the respective DNAs are subcloned in a CHO expression vector using standard techniques as described in Ausubel et al., Current Protocols of Molecular Biology, Unit 3.16, John Wiley and Sons (1997). CHO expression vectors are constructed to have compatible restriction sites 5′ and 3′ of the DNA of interest to allow the convenient shuttling of cDNA's. The vector used expression in CHO cells is as described in Lucas et al., Nucl. Acids Res. 24:9 (1774-1779 (1996), and uses the SV40 early promoter/enhancer to drive expression of the cDNA of interest and dihydrofolate reductase (DHFR). DHFR expression permits selection for stable maintenance of the plasmid following transfection.

[0706] Twelve micrograms of the desired plasmid DNA is introduced into approximately 10 million CHO cells using commercially available transfection reagents Superfect® (Quiagen), Dosper® or Fugene® (Boehringer Mannheim). The cells are grown as described in Lucas et al., supra. Approximately 3×10⁻⁷ cells are frozen in an ampule for further growth and production as described below.

[0707] The ampules containing the plasmid DNA are thawed by placement into water bath and mixed by vortexing. The contents are pipetted into a centrifuge tube containing 10 mLs of media and centrifuged at 1000 rpm for 5 minutes. The supernatant is aspirated and the cells are resuspended in 10 mL of selective media (0.2 μm filtered PS20 with 5% 0.2 gm diafiltered fetal bovine serum). The cells are then aliquoted into a 100 mL spinner containing 90 mL of selective media. After 1-2 days, the cells are transferred into a 250 mL spinner filled with 150 mL selective growth medium and incubated at 37° C. After another 2-3 days, 250 mL, 500 mL and 2000 mL spinners are seeded with 3×10⁵ cells/mL. The cell media is exchanged with fresh media by centrifugation and resuspension in production medium. Although any suitable CHO media can be employed, a production medium described in U.S. Pat. No. 5,122,469, issued Jun. 16, 1992 can actually be used. A 3L production spinner is seeded at 1.2×106 cells/mL. On day 0, the cell number pH is determined. On day 1, the spinner is sampled and sparging with filtered air is commenced. On day 2, the spinner is sampled, the temperature shifted to 33° C., and 30 mL of 500 g/L glucose and 0.6 mL of 10% antifoam (e.g., 35% polydimethylsiloxane emulsion, Dow Corning 365 Medical Grade Emulsion) taken.

[0708] Throughout the production, the pH is adjusted as necessary to keep it at around 7.2. After 10 days, or until the viability dropped below 70%, the cell culture is harvested by centrifugation and filtering through a 0.22 gm filter. The filtrate was either stored at 4° C. or immediately loaded onto columns for purification. For the poly-His tagged constructs, the proteins are purified using a Ni-NTA column (Qiagen). Before purification, imidazole is added to the conditioned media to a concentration of 5 mM. The conditioned media is pumped onto a 6 ml Ni-NTA column equilibrated in 20 mM Hepes, pH 7.4, buffer containing 0.3 M NaCl and 5 mM imidazole at a flow rate of 4-5 ml/min. at 4° C. After loading, the column is washed with additional equilibration buffer and the protein eluted with equilibration buffer containing 0.25 M imidazole. The highly purified protein is subsequently desalted into a storage buffer containing 10 mM Hepes, 0.14 M NaCl and 4% mannitol, pH 6.8, with a 25 ml G25 Superfine (Pharmacia) column and stored at −80° C.

[0709] Immunoadhesin (Fc-containing) constructs are purified from the conditioned media as follows. The conditioned medium is pumped onto a 5 ml Protein A column (Pharmacia) that had been equilibrated in 20 mM Na phosphate buffer, pH 6.8. After loading, the column is washed extensively with equilibration buffer before elution with 100 mM citric acid, pH 3.5. The eluted protein is immediately neutralized by collecting one ml fractions into tubes containing 275 μL of 1 M Tris buffer, pH 9. The highly purified protein is subsequently desalted into storage buffer as described above for the poly-His tagged proteins. The homogeneity is assessed by SDS polyacrylamide gels and by N-terminal amino acid sequencing by Edman degradation.

[0710] Stable expression in CHO cells was also accomplished without fusing the gene of interest to the Fc domain. In this case, a plasmid that expresses the gene of interest, such as pcDNA3.1/myc-his, described above, as a c-myc, poly His fusion, was transfected into approximately 5×10⁵ cells in a 35 mm tissue culture dish. The following day, the cells were dislodged by trypsin/EDTA or other comparable cell dissociation mixture, diluted into 100 ml growth media and plated into ten 100 mm tissue culture plates. The following day, the media was removed and replaced with media containing the appropriate amount of selection drug. In this case, the selection drug is G418 (Geneticin, Life Technologies) added to approximately 800 ug/ml. After approximately 10 days, the cells that did not stably take up the DNA are dead and small colonies of stably transfected cells are visible. These cells can be dissociated either singly, using cloning cylinders (Freshney, 2000), or as a pool and plated in larger tissue culture plates. Expression of the gene of interest can be detected in the individual clones, after expansion, by the techniques detailed above or by other techniques such as Western blotting using antibodies to the protein of interest or to the epitope tags.

[0711] In addition, the gene of interest was cloned into pIRES2-eGFP vector (Clonetech). This vector expresses an enhanced green fluorescence protein (eGFP) placed downstream from the internal ribosomal entry site (IRES). Cells are transfected with this vector and selected using G418. Cells that take up the DNA can be identified by fluorescence microscopy by identification of green fluorescent cells. Moreover, cells that express the gene of interest can be isolated or enriched by fluorescence activated cell sorting. Expression of the gene of interest by the GFP expressing cells was accomplished as above

[0712] In addition to CHO, HEK293 and HUVEC cells, the genes of interest are expressed in various tumor cell lines using the same vectors and detection techniques described above. Some of the human tumor cell lines used include SW480 (ATCC, CCL-228), HCT-116 (ATCC, CCL-247), DLD-1 (ATCC, CCL-221), LS 174T (ATCC, CCL-188) or HT-29, ATCC, HTB-38).

### Example 10

[0713] Gene Expression in Yeast

[0714] Recombinant expression of polypeptide in yeast can also be accomplished.

[0715] First, yeast expression vectors are constructed for intracellular production or secretion of a protein of the present invention from the ADH2/GAPDH promoter. DNA encoding a protein of the present invention and the promoter is inserted into suitable restriction enzyme sites in the selected plasmid to direct intracellular expression of a protein of the present invention. For secretion, DNA encoding a protein of the present invention can be cloned into the selected plasmid, together with DNA encoding the ADH2/GAPDH promoter, a native signal peptide of a protein of the present invention or other mammalian signal peptide, or, for example, a yeast alpha-factor or invertase secretory signal/leader sequence, and linker sequences (if needed) for expression of a protein of the present invention.

[0716] Yeast cells, such as yeast strain AB 110, can then be transformed with the expression plasmids described above and cultured in selected fermentation media. The transformed yeast supernatants can be analyzed by precipitation with 10% trichloroacetic acid and separation by SDS-PAGE, followed by staining of the gels with Coomassie Blue stain.

[0717] Recombinant polypeptide can subsequently be isolated and purified by removing the yeast cells from the fermentation medium by centrifugation and then concentrating the medium using selected cartridge filters. The concentrate containing polypeptide can further be purified using selected column chromatography resins.

### Example 11

[0718] Expression of Polypeptides in Baculovirus-Infected Cells

[0719] The following method describes recombinant expression of polypeptide in Baculovirus-infected insect cells.

[0720] The DNA sequence coding for polypeptide is fused upstream of an epitope tag contained within a baculovirus expression vector. Such epitope tags include poly-His tags and immunoglobulin tags (like Fc regions of IgG). A variety of plasmids can be employed, including plasmids derived from commercially available plasmids such as pVL 1393 (Novagen). Briefly, the sequence encoding polypeptide or the desired portion of the coding sequence such as the sequence encoding the extracellular domain of a transmembrane protein or the sequence encoding the mature protein if the protein is extracellular is amplified by PCR with primers complementary to the 5′ and 3′ regions. The 5′ primer can incorporate flanking (selected) restriction enzyme sites. The product is then digested with those selected restriction enzymes and subcloned into the expression vector.

[0721] Recombinant baculovirus is generated by co-transfecting the above plasmid and BaculoGold™ virus DNA (Pharmingen) into Spodoptera frugiperda (“Sf9”) cells (ATCC CRL 1711) using lipofectin (commercially available from GIBCO-BRL). After 4-5 days of incubation at 28° C., the released viruses are harvested and used for further amplifications. Viral infection and protein expression are performed as described by O'Reilley et al., Baculovirus expression vectors: A Laboratory Manual, Oxford: Oxford University Press (1994).

[0722] Expressed poly-His tagged polypeptide can then be purified, for example, by Ni²⁺-chelate affinity chromatography as follows. Extracts are prepared from recombinant virus-infected Sf9 cells as described by Rupert et al., Nature, 362:175-179 (1993). Briefly, Sf9 cells are washed, resuspended in sonication buffer (25 mL Hepes, pH 7.9; 12.5 mM MgCl₂; 01 mM EDTA; 10% glycerol; 0.1% NP-40; 0.4 M KCl), and sonicated twice for 20 seconds on ice. The sonicates are cleared by centrifugation, and the supernatant is diluted 50-fold in loading buffer (50 mM phosphate, 300 mM NaCl, 10% glycerol, pH 7.8) and filtered through a 0.45 gm filter. A Ni²⁺-NTA agarose column (commercially available from Qiagen) is prepared with a bed volume of 5 mL, washed with 25 mL of water, and equilibrated with 25 mL of loading buffer. The filtered cell extract is loaded onto the column at 0.5 mL per minute. The column is washed to baseline A₂₈₀ with loading buffer, at which point fraction collection is started. Next, the column is washed with a secondary wash buffer (50 mM phosphate; 300 mM NaCl, 10% glycerol, pH 6.0), which elutes nonspecifically bound protein. After reaching A₂₈₀ baseline again, the column is developed with a 0 to 500 mM imidazole gradient in the secondary wash buffer. One mL fractions are collected and analyzed by SDS-PAGE and silver staining or Western blot with Ni²⁺-NTA-conjugated to alkaline phosphatase (Qiagen). Fractions containing the eluted His₁₀-tagged protein are pooled and dialyzed against loading buffer.

[0723] Alternatively, purification of the IgG tagged (or Fc tagged) a protein of the present invention can be performed using known chromatography techniques, including for instance, Protein A or protein G column chromatography.

### Example 12

[0724] Preparation of Monoclonal Antibodies that Bind a Polypeptide of the Present Invention

[0725] This example illustrates preparation of monoclonal antibodies, which can specifically bind a protein of the present invention.

[0726] Techniques for producing the monoclonal antibodies are known in the art and are described, for instance, in Goding, supra. Immunogens that can be employed include purified a protein of the present invention, fusion proteins containing a protein of the present invention, and cells expressing recombinant a protein of the present invention on the cell surface. Selection of the immunogen can be made by the skilled artisan without undue experimentation. Mice, such as Balb/c, are immunized with the immunogen emulsified in complete Freund's adjuvant and injected subcutaneously or intraperitoneally in an amount from 1-100 micrograms. Alternatively, the immunogen is emulsified in MPL-TDM adjuvant (Ribi Immunochemical Research, Hamilton, Mont.) and injected into the animal's hind footpads. The immunized mice are then boosted 10 to 12 days later with additional immunogen emulsified in the selected adjuvant. Thereafter, for several weeks, the mice can also be boosted with additional immunization injections. Serum samples can be periodically obtained from the mice by retro-orbital bleeding for testing in ELISA assays to detect antibodies.

[0727] After a suitable antibody titer has been detected, the animals “positive” for antibodies can be injected with a final intravenous injection of polypeptide. Three to four days later, the mice are sacrificed and the spleen cells are harvested. The spleen cells are then fused (using 35% polyethylene glycol) to a selected murine myeloma cell line such as P3X63AgU.1, available from ATCC, No. CRL 1597. The fusions generate hybridoma cells, which can then be plated in 96 well tissue culture plates containing HAT (hypoxanthine, aminopterin, and thymidine) medium to inhibit proliferation of non-fused cells, myeloma hybrids, and spleen cell hybrids.

[0728] The hybridoma cells will be screened in an ELISA for reactivity against a protein of the present invention. Determination of “positive” hybridoma cells secreting the desired monoclonal antibodies against polypeptide is within the skill in the art.

[0729] The positive hybridoma cells can be injected intraperitoneally into syngeneic Balb/c mice to produce ascites containing the monoclonal antibodies against a protein of the present invention. Alternatively, the hybridoma cells can be grown in tissue culture flasks or roller bottles. Purification of the monoclonal antibodies produced in the ascites can be accomplished using ammonium sulfate precipitation, followed by gel exclusion chromatography. Alternatively, affinity chromatography based upon binding of antibody to protein A or protein G can be employed.

### Example 13

[0730] Preparation of Antibodies that Bind a Polypeptide of the Present Invention

[0731] This example illustrates preparation of polyclonal antibodies, which can specifically bind a protein of the present invention.

[0732] Techniques for producing the polyclonal antibodies are known in the art and are described, for instance, in Harlow and Lane, Antibodies: A Laboratory Manual, Cold Spring Harbor Laboratory, (1988). Immunogens that can be employed include purified a protein of the present invention, fusion proteins containing a protein of the present invention, and cells expressing recombinant a protein of the present invention on the cell surface or synthetic peptides derived from a protein of present invention coupled to a carrier protein. Selection of the immunogen can be made by the skilled artisan without undue experimentation. Tables 8-14 show exempliary peptides suitable for polyclonal antibody production. Rabbits, such as New Zealand White, are immunized with the immunogen emulsified in complete Freund's adjuvant and injected subcutaneously or intramuscular in an amount from 50-1000 micrograms. The immunized mice are then boosted 2 to 4 weeks later with additional immunogen emulsified in the selected adjuvant. Thereafter, for several months, the mice can also be boosted with additional immunization injections. Serum samples can be periodically obtained from the ear vein of rabbits for testing in ELISA assays to detect antibodies.

[0733] Purification of the polyclonal antibodies from serum can be accomplished using ammonium sulfate precipitation, followed by gel exclusion chromatography. Alternatively, affinity chromatography based upon binding of antibody to protein A, protein G or the immunogen can be employed.

TABLE 8
KIAA 0792 peptides

| | |
|---|---|
| CKIEQALAQTGSVAAAPQEALSN | (SEQ ID NO:3084) |
| CKIELPRDARKETVESHFRDLSN | (SEQ ID NO:3085) |
| CKIEDLLDKDPYSFGRTTIALSN | (SEQ ID NO:3086) |

[0734] TABLE 9
GPR-56 peptides

| | |
|---|---|
| CKIERGHREDFRFASQRNQTLSN | (SEQ ID NO:3087) |
| CKIEHAPFPAAHPASRSFPDLSN | (SEQ ID NO:3088) |
| CKIERLQARGGPSPLKSNSDLSN | (SEQ ID NO:3089) |

[0735] TABLE 10
P cadherin peptides

| | |
|---|---|
| VTDQNDHKPKFTQ | (SEQ ID NO:3090) |
| DANDNAPMFDPQKY | (SEQ ID NO:3091) |
| DVNEAPVFVPPSK | (SEQ ID NO:3092) |
| DVNDHGPVPEPRQI | (SEQ ID NO:3093) |
| RDWVVAPISVPE | (SEQ ID NO:3094) |
| YTLTIQATDMDGDGSTTTAV | (SEQ ID NO:3095) |

[0736] TABLE 11
FGFR3 peptides

| | |
|---|---|
| VENKFGSIRQTYTLD | (SEQ ID NO:3096) |
| GLPANQTAVLGSDVE | (SEQ ID NO:3097) |
| GLPANQTAILGSDVE | (SEQ ID NO:3098) |
| PYVTVLKTAGANTTDK | (SEQ ID NO:3099) |
| PYVTVLKSWISESVEAD | (SEQ ID NO:3100) |
| PYVTVLKSWISEVEAD | (SEQ ID NO:3101) |

[0737] TABLE 12
CCK4 peptides

| | |
|---|---|
| KQPSSQDALQGRRALLR | (SEQ ID NO:3102) |
| PAGSIEAQAVLQVLEKLK | (SEQ ID NO:3103) |
| KSLQSKDEQQQLDFRRE | (SEQ ID NO:3104) |

[0738] TABLE 13
TM4SF6

| | |
|---|---|
| EIKNSFKNNYEKALKQYN | (SEQ ID NO:3105) |
| DYRDWTDTNYYSEKGFPK | (SEQ ID NO:3106) |
| MASPSRRLQTKPVIT | (SEQ ID NO:3107) |

[0739] TABLE 14
IFITM

| | |
|---|---|
| MNHIVQTFSPVNSGQ | (SEQ ID NO:3108) |
| MSHTVQTFFSPVNSG | (SEQ ID NO:3109) |
| EMLKEEQEVAMLGGP | (SEQ ID NO:3110) |
| EMLKEEHEVAVLGGP | (SEQ ID NO:3111) |
| KSRDRKMVGDVTGAQ | (SEQ ID NO:3112) |

### Example 14

[0740] Purification of Polypeptides Using Specific Antibodies

[0741] Native or recombinant polypeptides can be purified by a variety of standard techniques in the art of protein purification. For example, pro-polypeptide, mature polypeptide, or pre-polypeptide is purified by immunoaffinity chromatography using antibodies specific for the polypeptide of interest. In general, an immunoaffinity column is constructed by covalently coupling the antibody to an activated chromatographic resin. Polyclonal immunoglobulins are prepared from immune sera either by precipitation with ammonium sulfate or by purification on immobilized Protein A (Pharmacia LK.B Biotechnology, Piscataway, N.J.). Likewise, monoclonal antibodies are prepared from mouse ascites fluid by ammonium sulfate precipitation or chromatography on immobilized Protein A. Partially purified immunoglobulin is covalently attached to a chromatographic resin such as CnBr-activated SEPHAROSE™ (Pharmacia LK.B Biotechnology). The antibody is coupled to the resin, the resin is blocked, and the derivative resin is washed according to the manufacturer's instructions.

[0742] Such an immunoaffinity column is utilized in the purification of polypeptide by preparing a fraction from cells containing polypeptide in a soluble form. This preparation is derived by solubilization of the whole cell or of a subcellular fraction obtained via differential centrifugation by the addition of detergent or by other methods well known in the art. Alternatively, soluble polypeptide containing a signal sequence can be secreted in useful quantity into the medium in which the cells are grown.

[0743] A soluble polypeptide-containing preparation is passed over the immunoaffinity column, and the column is washed under conditions that allow the preferential absorbance of polypeptide (e.g., high ionic strength buffers in the presence of detergent). Then, the column is eluted under conditions that disrupt antibody/polypeptide binding (e.g., a low pH buffer such as approximately pH 2-3, or a high concentration of a chaotrope such as urea or thiocyanate ion), and polypeptide is collected.

1. An antibody that immunospecifically-binds to p-cadherin or a fragment thereof.

2. The antibody of claim 1 wherein said p-cadherin has the amino acid sequence of SEQ ID NO: 39.

3. The antibody of claim 2, wherein said antibody is a monoclonal antibody.

4. The antibody of claim 2, wherein said antibody is an antibody fragment selected from the group consisting of a FV fragment, a Fab fragment, (Fab)₂ fragment, a single chain antibody.

5. The antibody of claim 4 wherein said antibody is conjugated with at least one polyethylene glycol moiety.

6. The antibody of claim 3 wherein said antibody is an antagonist.

7. The antibody of claim 6 wherein the antibody is a humanized antibody.

8. The antibody of claim 6 wherein the antibody is a human antibody.

9. A method of identifying an agent that binds to p-cadherin comprising:
(a) contacting p-cadherin with said agent; and
(b) determining whether said agent binds to p-cadherin.

10. A method for identifying an agent that modulates the expression or activity of p-cadherin comprising:
(a) providing a cell expressing said polypeptide in an operational manner;
(b) contacting the cell with said agent; and
(c) determining whether the agent modulates expression or activity of said polypeptide;
whereby an alteration in expression or activity of p-cadherin indicates said agent modulates expression or activity of p-cadherin.

11. A method of treating or preventing a cancer-associated disorder, said method comprising administering to a subject in which such treatment or prevention is desired said antibody of claim 1 in an amount sufficient to treat or prevent said cancer-associated disorder in said subject.

12. A method of detecting differentially expressed genes correlated with a cancerous state of a mammalian cell, the method comprising the step of detecting at least one differentially expressed gene product in a test sample derived from a cell suspected of being cancerous, where the gene product is encoded by a sequence of SEQ ID NO:1 wherein detection of differentially expressed product is correlated with a cancerous state of the cell from which the test sample was derived.

13. A method for monitoring the progression of a cancer in a patient, the method comprising:
a) detecting in a patient sample at a first point in time, the expression of a marker, wherein the marker a nucleic acid molecule of SEQ ID NO:1;
b) repeating step a) at a subsequent point in time; and
c) comparing the level of expression detected in steps a) and b), and therefrom monitoring the progression of the cancer.

14. A method of assessing the efficacy of a test compound for inhibiting a cancer in a patient, the method comprising comparing:
a) expression of a marker in a first sample obtained from the patient exposed to the test compound, wherein the marker is selected the nucleic acid molecule of SEQ ID NO:1, and
b) expression of the marker in a second sample obtained from the patient, wherein the sample is not exposed to the test compound, wherein a significantly lower level of expression of the marker in the first sample, relative to the second sample, is an indication that the test compound is efficacious for inhibiting the cancer in the patient.

The application's sequence listing, which the Patent Office published only in electronic form, follows.

SEQUENCE LISTING (3114 sequences)

SEQ ID NO: 1 - DNA, 3168 bp, homo sapiens
gcggaacaccggcccgccgtcgcggcagctgcttcacccctctctctgcagccatggggctccctcgtggacctctcgcgtctctcctccttctccaggtttgctggctgcagtgcgcggcctccgagccgtgccgggcggtcttcagggaggctgaagtgaccttggaggcgggaggcgcggagcaggagcccggccaggcgctggggaaagtattcatgggctgccctgggcaagagccagctctgtttagcactgataatgatgacttcactgtgcggaatggcgagacagtccaggaaagaaggtcactgaaggaaaggaatccattgaagatcttcccatccaaacgtatcttacgaagacacaagagagattgggtggttgctccaatatctgtccctgaaaatggcaagggtcccttcccccagagactgaatcagctcaagtctaataaagatagagacaccaagattttctacagcatcacggggccgggggcagacagcccccctgagggtgtcttcgctgtagagaaggagacaggctggttgttgttgaataagccactggaccgggaggagattgccaagtatgagctctttggccacgctgtgtcagagaatggtgcctcagtggaggaccccatgaacatctccatcatcgtgaccgaccagaatgaccacaagcccaagtttacccaggacaccttccgagggagtgtcttagagggagtcctaccaggtacttctgtgatgcaggtgacagccacagatgaggatgatgccatctacacctacaatggggtggttgcttactccatccatagccaagaaccaaaggacccacacgacctcatgttcacaattcaccggagcacaggcaccatcagcgtcatctccagtggcctggaccgggaaaaagtccctgagtacacactgaccatccaggccacagacatggatggggacggctccaccaccacggcagtggcagtagtggagatccttgatgccaatgacaatgctcccatgtttgacccccagaagtacgaggcccatgtgcctgagaatgcagtgggccatgaggtgcagaggctgacggtcactgatctggacgcccccaactcaccagcgtggcgtgccacctaccttatcatgggcggtgacgacggggaccattttaccatcaccacccaccctgagagcaaccagggcatcctgacaaccaggaagggtttggattttgaggccaaaaaccagcacaccctgtacgttgaagtgaccaacgaggccccttttgtgctgaagctcccaacctccacagccaccatagtggtccacgtggaggatgtgaatgaggcacctgtgtttgtcccaccctccaaagtcgttgaggtccaggagggcatccccactggggagcctgtgtgtgtctacactgcagaagaccctgacaaggagaatcaaaagatcagctaccgcatcctgagagacccagcagggtggctagccatggacccagacagtgggcaggtcacagctgtgggcaccctcgaccgtgaggatgagcagtttgtgaggaacaacatctatgaagtcatggtcttggccatggacaatggaagccctcccaccactggcacgggaacccttctgctaacactgattgatgtcaacgaccatggcccagtccctgagccccgtcagatcaccatctgcaaccaaagccctgtgcgccacgtgctgaacatcacggacaaggacctgtctccccacacctcccctttccaggcccagctcacagatgactcagacatctactggacggcagaggtcaacgaggaaggtgacacagtggtcttgtccctgaagaagttcctgaagcaggatacatatgacgtgcacctttctctgtctgaccatggcaacaaagagcagctgacggtgatcagggccactgtgtgcgactgccatggccatgtcgaaacctgccctggaccctggaaaggaggtttcatcctccctgtgctgggggctgtcctggctctgctgttcctcctgctggtgctgcttttgttggtgagaaagaagcggaagatcaaggagcccctcctactcccagaagatgacacccgtgacaacgtcttctactatggcgaagaggggggtggcgaagaggaccaggactatgacatcacccagctccaccgaggtctggaggccaggccggaggtggttctccgcaatgacgtggcaccaaccatcatcccgacacccatgtaccgtcctaggccagccaacccagatgaaatcggcaactttataattgagaacctgaaggcggctaacacagaccccacagccccgccctacgacaccctcttggtgttcgactatgagggcagcggctccgacgccgcgtccctgagctccctcacctcctccgcctccgaccaagaccaagattacgattatctgaacgagtggggcagccgcttcaagaagctggcagacatgtacggtggcggggaggacgactaggcggcctgcctgcagggctggggaccaaacgtcaggccacagagcatctccaaggggtctcagttcccccttcagctgaggacttcggagcttgtcaggaagtggccgtagcaacttggcggagacaggctatgagtctgacgttagagtggttgcttccttagcctttcaggatggaggaatgtgggcagtttgacttcagcactgaaaacctctccacctgggccagggttgcctcagaggccaagtttccagaagcctcttacctgccgtaaaatgctcaaccctgtgtcctgggcctgggcctgctgtgactgacctacagtggactttctctctggaatggaaccttcttaggcctcctggtgcaacttaatttttttttttaatgctatcttcaaaacgttagagaaagttcttcaaaagtgcagcccagagctgctgggcccactggccgtcctgcatttctggtttccagaccccaatgcctcccattcggatggatctctgcgtttttatactgagtgtgcctaggttgccccttattttttattttccctgttgcgttgctatagatgaagggtgaggacaatcgtgtatatgtactagaacttttttattaaag

SEQ ID NO: 2 - DNA, 4531 bp, homo sapiens
ggatcctctagggtcccagctcgcctcgatggagctcctcccgccgctgcctcagtccttcctgttgctgctgctgttgcctgccaagcccgcggcgggcgaggactggcagtgcccgcgcaccccctacgcggcctctcgcgactttgacgtgaagtacgtggtgcccagcttctccgccggaggcctggtacaggccatggtgacctacgagggcgacagaaatgagagtgctgtgtttgtagccatacgcaatcgcctgcatgtgcttgggcctgacctgaagtctgtccagagcctggccacgggccctgctggagaccctggctgccagacgtgtgcagcctgtggcccaggaccccacggccctcccggtgacacagacacaaaggtgctggtgctggatcccgcgctgcctgcgctggtcagttgtggctccagcctgcagggccgctgcttcctgcatgacctagagccccaagggacagccgtgcatctggcagcgccagcctgcctcttctcagcccaccataaccggcccgatgactgccccgactgtgtggccagcccattgggcacccgtgtaactgtggttgagcaaggccaggcctcctatttctacgtggcatcctcactggacgcagccgtggctggcagcttcagcccacgctcagtgtctatcaggcgtctcaaggctgacgcctcgggattcgcaccgggctttgtggcgttgtcagtgctgcccaagcatcttgtctcctacagtattgaatacgtgcacagcttccacacgggagccttcgtatacttcctgactgtacagccggccagcgtgacagatgatcctagtgccctgcacacacgcctggcacggcttagcgccactgagccagagttgggtgactatcgggagctggtcctcgactgcagatttgctccaaaacgcaggcgccggggggccccagaaggcggacagccctaccctgtgctgcaggtggcccactccgctccagtgggtgcccaacttgccactgagctgagcatcgccgagggccaggaagtactatttggggtctttgtgactggcaaggatggtggtcctggcgtgggccccaactctgtcgtctgtgccttccccattgacctgctggacacactaattgatgagggtgtggagcgctgttgtgaatccccagtccatccaggcctccggcgaggcctcgacttcttccagtcgcccagtttttgccccaacccgcctggcctggaagccctcagccccaacaccagctgccgccacttccctctgctggtcagtagcagcttctcacgtgtggacctattcaatgggctgttgggaccagtacaggtcactgcattgtatgtgacacgccttgacaacgtcacagtggcacacatgggcacaatggatgggcgtatcctgcaggtggagctggtcaggtcactaaactacttgctgtatgtgtccaacttctcactgggtgacagtgggcagcccgtgcagcgggatgtcagtcgtcttggggaccacctactctttgcctctggggaccaggttttccaggtacctatccgaggccctggctgccgccacttcctgacctgtgggcgttgcctaagggcatggcatttcatgggctgtggctggtgtgggaacatgtgcggccagcagaaggagtgtcctggctcctggcaacaggaccactgcccacctaagcttactgagttccacccccacagtggacctctaaggggcagtacaaggctgaccctgtgtggctccaacttctaccttcacccttctggtctggtgcctgagggaacccatcaggtcactgtgggccaaagtccctgccggccactgcccaaggacagctcaaaactcagaccagtgccccggaaagactttgtagaggagtttgagtgtgaactggagcccttgggcacccaggcagtggggcctaccaacgtcagcctcaccgtgactaacatgccaccgggcaagcacttccgggtagacggcacctccgtgctgagaggcttctctttcatggagccagtgctgatagcagtgcaacccctctttggcccacgggcaggaggcacctgtctcactcttgaaggccagagtctgtctgtaggcaccagccgggctgtgctggtcaatgggactgagtgtctgctagcacgggtcagtgaggggcagcttttatgtgccacaccccctggggccacggtggccagtgtcccccttagcctgcaggtggggggtgcccaggtacctggttcctggaccttccagtacagagaagaccctgtcgtgctaagcatcagccccaactgtggctacatcaactcccacatcaccatctgtggccagcatctaacttcagcatggcacttagtgctgtcattccatgacgggcttagggcagtggaaagcaggtgtgagaggcagcttccagagcagcagctgtgccgccttcctgaatatgtggtccgagacccccagggatgggtggcagggaatctgagtgcccgaggggatggagctgctggctttacactgcctggctttcgcttcctacccccaccccatccacccagtgccaacctagttccactgaagcctgaggagcatgccattaagtttgagtatattgggctgggcgctgtggctgactgtgtgggtatcaacgtgaccgtgggtggtgagagctgccagcacgagttccggggggacatggttgtctgccccctgcccccatccctgcagcttggccaggatggtgccccattgcaggtctgcgtagatggtgaatgtcatatcctgggtagagtggtgcggccagggccagatggggtcccacagagcacgctccttggtatcctgctgcctttgctgctgcttgtggctgcactggcgactgcactggtcttcagctactggtggcggaggaagcagctagttcttcctcccaacctgaatgacctggcatccctggaccagactgctggagccacacccctgcctattctgtactcgggctctgactacagaagtggccttgcactccctgccattgatggtctggattccaccacttgtgtccatggagcatccttctccgatagtgaagatgaatcctgtgtgccactgctgcggaaagagtccatccagctaagggacctggactctgcgctcttggctgaggtcaaggatgtgctgattccccatgagcgggtggtcacccacagtgaccgagtcattggcaaaggccactttggagttgtctaccacggagaatacatagaccaggcccagaatcgaatccaatgtgccatcaagtcactaagtcgcatcacagagatgcagcaggtggaggccttcctgcgagaggggctgctcatgcgtggcctgaaccacccgaatgtgctggctctcattggtatcatgttgccacctgagggcctgccccatgtgctgctgccctatatgtgccacggtgacctgctccagttcatccgctcacctcagcggaaccccaccgtgaaggacctcatcagctttggcctgcaggtagcccgcggcatggagtacctggcagagcagaagtttgtgcacagggacctggctgcgcggaactgcatgctggacgagtcattcacagtcaaggtggctgactttggtttggcccgcgacatcctggacagggagtactatagtgttcaacagcatcgccacgctcgcctacctgtgaagtggatggcgctggagagcctgcagacctatagatttaccaccaagtctgatgtgtggtcatttggtgtgctgctgtgggaactgctgacacggggtgccccaccataccgccacattgacccttttgaccttacccacttcctggcccagggtcggcgcctgccccagcctgagtattgccctgattctctgtaccaagtgatgcagcaatgctgggaggcagacccagcagtgcgacccaccttcagagtactagtgggggaggtggagcagatagtgtctgcactgcttggggaccattatgtgcagctgccagcaacctacatgaacttgggccccagcacctcgcatgagatgaatgtgcgtccagaacagccgcagttctcacccatgccagggaatgtacgccggccccggccactctcagagcctcctcggcccacttgacttagttcttgggctggacctgcttagctgccttgagctaaccccaaggctgcctctgggccatgccaggccagagcagtggccctccaccttgttcctgccctttaactttcagaggcaataggtaaatgggcccattaggtccctcactccacagagtgagccagtgagggcagtcctgcaacatgtatttatggagtgcctgctgtggaccctgtcttctgggcacagtggactcagcagtgaccacaccaacactgacccttgaaccaataaaggaacaaatgactattaaagcac

SEQ ID NO: 3 - DNA, 2822 bp, homo sapiens
cggcagcagggtctcgctctgtcacacaggctggagtgcagtggtgtgatcttggctcatcgtaacctccacctcccgggttcaagtgattctcatgcctcagcctcccgagtagctgggattacaggtggtgacttccaagagtgactccgtcggaggaaaatgactccccagtcgctgctgcagacgacactgttcctgctgagtctgctcttcctggtccaaggtgcccacggcaggggccacagggaagactttcgcttctgcagccagcggaaccagacacacaggagcagcctccactacaaacccacaccagacctgcgcatctccatcgagaactccgaagaggccctcacagtccatgcccctttccctgcagcccaccctgcttcccgatccttccctgaccccaggggcctctaccacttctgcctctactggaaccgacatgctgggagattacatcttctctatggcaagcgtgacttcttgctgagtgacaaagcctctagcctcctctgcttccagcaccaggaggagagcctggctcagggccccccgctgttagccacttctgtcacctcctggtggagccctcagaacatcagcctgcccagtgccgccagcttcaccttctccttccacagtcctccccacacggccgctcacaatgcctcggtggacatgtgcgagctcaaaagggacctccagctgctcagccagttcctgaagcatccccagaaggcctcaaggaggccctcggctgcccccgccagccagcagttgcagagcctggagtcgaaactgacctctgtgagattcatgggggacatggtgtccttcgaggaggaccggatcaacgccacggtatggaagctccagcccacagccggcctccaggacctgcacatccactcccggcaggaggaggagcagagcgagatcatggagtactcggtgctgctgcctcgaacactcttccagaggacgaaaggccggagcggggaggctgagaagagactcctcctggtggacttcagcagccaagccctgttccaggacaagaattccagccaagtcctgggtgagaaggtcttggggattgtggtacagaacaccaaagtagccaacctcacggagcccgtggtgctcactttccagcaccagctacagccgaagaatgtgactctgcaatgtgtgttctgggttgaagaccccacattgagcagcccggggcattggagcagtgctgggtgtgagaccgtcaggagagaaacccaaacatcctgcttctgcaaccacttgacctactttgcagtgctgatggtctcctcggtggaggtggacgccgtgcacaagcactacctgagcctcctctcctacgtgggctgtgtcgtctctgccctggcctgccttgtcaccattgccgcctacctctgctccagggtgcccctgccgtgcaggaggaaacctcgggactacaccatcaaggtgcacatgaacctgctgctggccgtcttcctgctggacacgagcttcctgctcagcgagccggtggccctgacaggctctgaggctggctgccgagccagtgccatcttcctgcacttctccctgctcacctgcctttcctggatgggcctcgaggggtacaacctctaccgactcgtggtggaggtctttggcacctatgtccctggctacctactcaagctgagcgccatgggctggggcttccccatctttctggtgacgctggtggccctggtggatgtggacaactatggccccatcatcttggctgtgcataggactccagagggcgtcatctacccttccatgtgctggatccgggactccctggtcagctacatcaccaacctgggcctcttcagcctggtgtttctgttcaacatggccatgctagccaccatggtggtgcagatcctgcggctgcgcccccacacccaaaagtggtcacatgtgctgacactgctgggcctcagcctggtccttggcctgccctgggccttgatcttcttctcctttgcttctggcaccttccagcttgtcgtcctctaccttttcagcatcatcacctccttccaaggcttcctcatcttcatctggtactggtccatgcggctgcaggcccggggtggcccctcccctctgaagagcaactcagactgcgccaggctccccatcagctcgggcagcacctcgtccagccgcatctaggcctccagcccacctgcccatgtgatgaagcagagatgcggcctcgtcgcacactgcctgtggcccccgagccaggcccagccccaggccagtcagccgcagactttggaaagcccaacgaccatggagagatgggccgttgccatggtggacggactcccggggctggggcttttgaattggccttggggactactcggctctcactcagctcccacgggactcagaagtgcgccgccatgctgcctagggtactgtccccacatctgtcccaacccagctggaggcctggtctctccttacaacccctgggcccagcctcattgctgggggccaggccttggatcttgagggtctggcacatccttaatcctgtgcccctgcctgggacagaaatgtggctccagttgctctgtctctcgtggtcaccctgagggcactctgcatcctctgtcattttaacctcaggtggcacccagggcgaatggggcccagggcagaccttcagggccagagccctggcggaggagaggccctttgccaggagcacagcagcagctcgcctacctctgagcccg

SEQ ID NO: 4 - DNA, 2520 bp, homo sapiens
cgcgcgctgcctgaggacgccgcggcccccgcccccgccatgggcgcccctgcctgcgccctcgcgctctgcgtggccgtggccatcgtggccggcgcctcctcggagtccttggggacggagcagcgcgtcgtggggcgagcggcagaagtcccgggcccagagcccggccagcaggagcagttggtcttcggcagcggggatgctgtggagctgagctgtcccccgcccgggggtggtcccatggggcccactgtctgggtcaaggatggcacagggctggtgccctcggagcgtgtcctggtggggccccagcggctgcaggtgctgaatgcctcccacgaggactccggggcctacagctgccggcagcggctcacgcagcgcgtactgtgccacttcagtgtgcgggtgacagacgctccatcctcgggagatgacgaagacggggaggacgaggctgaggacacaggtgtggacacaggggccccttactggacacggcccgagcggatggacaagaagctgctggccgtgccggccgccaacaccgtccgcttccgctgcccagccgctggcaaccccactccctccatctcctggctgaagaacggcagggagttccgcggcgagcaccgcattggaggcatcaagctgcggcatcagcagtggagcctggtcatggaaagcgtggtgccctcggaccgcggcaactacacctgcgtcgtggagaacaagtttggcagcatccggcagacgtacacgctggacgtgctggagcgctccccgcaccggcccatcctgcaggcggggctgccggccaaccagacggcggtgctgggcagcgacgtggagttccactgcaaggtgtacagtgacgcacagccccacatccagtggctcaagcacgtggaggtgaacggcagcaaggtgggcccggacggcacaccctacgttaccgtgctcaagacggcgggcgctaacaccaccgacaaggagctagaggttctctccttgcacaacgtcacctttgaggacgccggggagtacacctgcctggcgggcaattctattgggttttctcatcactctgcgtggctggtggtgctgccagccgaggaggagctggtggaggctgacgaggcgggcagtgtgtatgcaggcatcctcagctacggggtgggcttcttcctgttcatcctggtggtggcggctgtgacgctctgccgcctgcgcagcccccccaagaaaggcctgggctcccccaccgtgcacaagatctcccgcttcccgctcaagcgacaggtgtccctggagtccaacgcgtccatgagctccaacacaccactggtgcgcatcgcaaggctgtcctcaggggagggccccacgctggccaatgtctccgagctcgagctgcctgccgaccccaaatgggagctgtctcgggcccggctgaccctgggcaagccccttggggagggctgcttcggccaggtggtcatggcggaggccatcggcattgacaaggaccgggccgccaagcctgtcaccgtagccgtgaagatgctgaaagacgatgccactgacaaggacctgtcggacctggtgtctgagatggagatgatgaagatgatcgggaaacacaaaaacatcatcaacctgctgggcgcctgcacgcagggcgggcccctgtacgtgctggtggagtacgcggccaagggtaacctgcgggagtttctgcgggcgcggcggcccccgggcctggactactccttcgacacctgcaagccgcccgaggagcagctcaccttcaaggacctggtgtcctgtgcctaccaggtggcccggggcatggagtacttggcctcccagaagtgcatccacagggacctggctgcccgcaatgtgctggtgaccgaggacaacgtgatgaagatcgcagacttcgggctggcccgggacgtgcacaacctcgactactacaagaagacaaccaacggccggctgcccgtgaagtggatggcgcctgaggccttgtttgaccgagtctacactcaccagagtgacgtctggtcctttggggtcctgctctgggagatcttcacgctggggggctccccgtaccccggcatccctgtggaggagctcttcaagctgctgaaggagggccaccgcatggacaagcccgccaactgcacacacgacctgtacatgatcatgcgggagtgctggcatgccgcgccctcccagaggcccaccttcaagcagctggtggaggacctggaccgtgtccttaccgtgacgtccaccgacgagtacctggacctgtcggcgcctttcgagcagtactccccgggtggccaggacacccccagctccagctcctcaggggacgactccgtgtttgcccacgacctgctgcccccggccccacccagcagtgggggctcgcggacgtgaagggccactggtccccaacaatgtgaggggtccctagcagccctccctgctgctggtgca

SEQ ID NO: 5 - DNA, 4102 bp, homo sapiens
cactttgtaacttttaagtggtcggaacacgccccgcgctgctgggtcccgccagacacgccgccgccgcaggaaagtctacagtttggtaccccaggactcgctggtcaggaaagccctgcaggacatgagtgttaggcccgacgcctggcccttggcagcttgggaggtggctggggctgcttttgcctttgccagagacagctccaactgaggacctctccaacgggcccatccacagtccttccttcccctagtgtctgggaagacaggcgcgatgatggactccccgttcctggagctgtggcagtccaaggcagtgtccatcagggagcagctgggactcggggaccggcccaacgactcctattgctacaactcggccaaaaacagcaccgtgctccagggggtcacctttggtggcatccccactgtcctgctcatagacgtcagctgcttcctgttcttaatcttggtgttttctattataagaagaagattctgggactatggccgcattgccctggtgtcagaagcagacagcgagtccagatttcagagattgtcatcgacttcctcctcaggtcaacaagactttgaaaatgagctgggatgctgtccctggctgactgccatcttccgtctgcatgatgaccagatcctggaatggtgtggggaggacgccatccactacctgtccttccagaggcacatcatcttcctgttggtggtggtcagctttttgtccctgtgtgtcatcctgcctgtcaacctctcaggggacttgctggacaaagacccgtatagttttgggaggacaacaatagcaaacctacagactgacaatgacctcctttggctgcacaccatctttgctgtcatttacctcttcctcactgtgggtttcatgcggcaccacactcagtccattaagtacaaagaggagaacctggtgaggcggaccctgttcatcacaggactccccagagatgccaggaaggagactgtggagagccacttccgggacgcgtatcccacgtgtgaggtggttgatgtgcagctgtgctacaacgtggccaaactgatctacctgtgcaaggagaaaaagaagactgagaagagcctgacctattacacaaacctgcaggtgaagacaggccagcggaccctcatcaaccccaagccctgtggccagttttgctgctgtgaagtgctgggctgtgagtgggaagacgccatctcttactacacacggatgaaggacaggctgctggagaggatcacagaggaagaacgccacgtccaggaccagcccctgggaatggccttcgtcaccttccaggagaagtccatggccacctacatcctgaaagatttcaatgcctgcaagtgtcagagccttcagtgcaaaggtgagccccagccgtcctcccatagcagggagctctatacctccaagtggacagtcacctttgctgctgaccctgaggacatctgctggaagaacctctctatccagggcctccgctggtggctacagtggctgggcatcaacttcaccctcttcctggggctatttttcctgaccacaccctccatcatcctgtccaccatggacaagtttaatgtcaccaaacccatccatgcgctgaataacccgatcatcagccagttcttccccaccctcctgctctggtccttctcggccctgctcccctccattgtctactactctacactgctggagtctcactggaccaagtcgggggaaaaccagatcatgatgaccaaagtctacatattcttgatcttcatggtgctgatcctgccctccctgggtctcaccagtctagattttttcttccggtggctctttgacaaaacttcctcggaggcctccatcaggttggagtgcgtcttcctgcctgaccagggtgccttctttgtgaactatgtcatcgcctcggccttcatcggcaatggcatggagctgctgcggctgccaggtctcatcctctataccttccgcatgatcatggccaagacggctgctgaccgcaggaatgtcaagcagaaccaggccttccagtacgagtttggagccatgtatgcatggatgctgtgtgtcttcactgtcatcgtggcctacagcatcacttgtcccatcatcgcgccatttggcctcatctacatcctgctcaagcacatggtggaccggcacaacctctacttcgtctacctcccagccaagctggagaaggggatccactttgccgctgtgaaccaggccttggcagcccccatcctgtgcctcttctggctctacttcttttccttcctgcgcctgggtatgaaggcccccgccactctgttcaccttcctggtgctgctgctcaccatcctggtctgcctggctcacacctgctttggatgcttcaagcacctcagccctctgaactacaaaacagaagagcctgcaagtgacaaaggaagtgaggcagaggcccacatgcccccaccgttcacaccctacgtgcctcggattctgaacggcttggcctcggagaggacagcactgtctccgcagcagcagcagcagcagacctatggtgccatccacaacatcagcgggactatccctggacagtgcttggcgcagagcgccacgggcagtgtggctgctgccccccaggaggcctgaggctgggtctcactgctctgaaaagacacaaccagaatggcctggggctcaggcccttggctgagtgggaatgcgttgggactgcccagctgagctatcaggtgcccatcttttctggtcccagcagtggtgaggagagcacaggcaggcctcgcccctcccttgctcacccagtttcccctccggcacaagcttccagctctgcagctggggtgacatccccagtggtttgtcgccaagaccatgtggtggacttttcgccccccaaactgatgagtccgggagaatatatggagagagagatgtaacaaggggaaggcctcctcccttctgagcacacacacaaccgataaccaaagagatgctgcagtccaggtctgaggtcccgctggcatccagctccctgctccatggccagtccctccccagcccagcagtccctccaggctacatccaggagtaagctatggggaacaggttgggaggtggccagtgctcctgccagctgtgcacacatctctgtatcccgctagagttctgtgtttttgtatcatgttgtcagggacgctagctgggtcagggttaccccatagcaggcagggacaaggaccactcataatatgcccattggaccacagttaagatccagcctctctcacctcttcagggctgagtgcatgagtctgcacctccaggcaggctctgtgcagtactcacccccctccgtctgctccctccaaggtgtgggggtgggcagtgctcagggcctcctcggagccaaaggacagcatggtcggcacagaggaaggggtacctgggctgggtgcagggccatcccactgcccttgagctgtggctctggcaggaaggaggggcagcccatccctcttctccctcctggggattctggggaatgggatgcaacttaagacttctgcctgagaagcctcctccctgctgcctccagggggcaccaaggcacaagcctgtgcagtaggggcgggatgggggtgtggaagagcaggtccaggctcctagcacaactggcctggggccttggcacctctgtaggccctgcctgtgcctgtccgctggcctggggggcctgggcttatctgggccttctcactcagggactctcttgacgctgacttgcccccgcagtggtggccagtgctgcctctgctccaagctgcccctgcgctgggaggggtgggggcggtgccattggtctggtgcagcatagccctggccagtggcctcatccccagcaggcctcccgtgcctctgccagcaaggaggggccggccagctctgcttgcacagggggccccatgtggggtcagcgcacgctcatgtcactgagttccagccgcttttagagtaaagtcgtttatcatc

SEQ ID NO: 6 - DNA, 930 bp, homo sapiens
atgaatggcacctacaacacctgtggctccagcgacctcacctggcccccagcgatcaagctgggcttctacgcctacttgggcgtcctgctggtgctaggcctgctgctcaacagcctggcgctctgggtgttctgctgccgcatgcagcagtggacggagacccgcatctacatgaccaacctggcggtggccgacctctgcctgctgtgcaccttgcccttcgtgctgcactccctgcgagacacctcagacacgccgctgtgccagctctcccagggcatctacctgaccaacaggtacatgagcatcagcctggtcacggccatcgccgtggaccgctatgtggccgtgcggcacccgctgcgtgcccgcgggctgcggtcccccaggcaggctgcggccgtgtgcgcggtcctctgggtgctggtcatcggctccctggtggctcgctggctcctggggattcaggagggcggcttctgcttcaggagcacccggcacaatttcaactccatgcggttcccgctgctgggattctacctgcccctggccgtggtggtcttctgctccctgaaggtggtgactgccctggcccagaggccacccaccgacgtggggcaggcagaggccacccgcaaggctgcccgcatggtctgggccaacctcctggtgttcgtggtctgcttcctgcccctgcacgtggggctgacagtgcgcctcgcagtgggctggaacgcctgtgccctcctggagacgatccgtcgcgccctgtacataaccagcaagctctcagatgccaactgctgcctggacgccatctgctactactacatggccaaggagttccaggaggcgtctgcactggccgtggctccccgtgctaaggcccacaaaagccaggactctctgtgcgtgaccctcgcctaa

SEQ ID NO: 7 - DNA, 430 bp, homo sapiens
ggtgggtctgaatctagcaccatgacggaactagagacagccatgggcatgatcatagacgtcttttcccgatattcgggcagcgagggcagcacgcagaccctgaccaagggggagctcaaggtgctgatggagaaggagctaccaggcttcctgcagagtggaaaagacaaggatgccgtggataaattgctcaaggacctggacgccaatggagatgcccaggtggacttcagtgagttcatcgtgttcgtggctgcaatcacgtctgcctgtcacaagtactttgagaaggcaggactcaaatgatgccctggagatgtcacagattcctgcagagccatggtcccaggcttcccaaaagtgtttgttggcaattattcccctaggctgagcctgctcatgtacctctgattaataaatgcttatg

SEQ ID NO: 8 - DNA, 3092 bp, homo sapiens
gaccaggactgtgcggctgccggagtcctgggaagttgtggctgtcgagaatgggggtctgtgggtacctgttcctgccctggaagtgcctcgtggtcgtgtctctcaggctgctgttccttgtacccacaggagtgcccgtgcgcagcggagatgccaccttccccaaagctatggacaacgtgacggtccggcagggggagagcgccaccctcaggtgtaccatagatgaccgggtaacccgggtggcctggctaaaccgcagcaccatcctctacgctgggaatgacaagtggtccatagaccctcgtgtgatcatcctggtcaatacaccaacccagtacagcatcatgatccaaaatgtggatgtgtatgacgaaggtccgtacacctgctctgtgcagacagacaatcatcccaaaacgtcccgggttcacctaatagtgcaagttcctcctcagatcatgaatatctcctcagacatcactgtgaatgagggaagcagtgtgaccctgctgtgtcttgctattggcagaccagagccaactgtgacatggagacacctgtcagtcaaggaaggccagggctttgtaagtgaggatgagtacctggagatctctgacatcaagcgagaccagtccggggagtacgaatgcagcgcgttgaacgatgtcgctgcgcccgatgtgcggaaagtaaaaatcactgtaaactatcctccctatatctcaaaagccaagaacactggtgtttcagtcggtcagaagggcatcctgagctgtgaagcctctgcagtccccatggctgaattccagtggttcaaggaagaaaccaggttagccactggtctggatggaatgaggattgaaaacaaaggccgcatgtccactctgactttcttcaatgtttctgaaaaggattatgggaactatacttgtgtggccacgaacaagcttgggaacaccaatgccagcatcacattgtatgggcctggagcagtcattgatggtgtaaactcggcctccagagcactggcttgtctctggctatcagggaccctcttagcccacttcttcatcaagttttgataagaaatcctaggtcctctgagcaacgcctgcttctcatatcacagactttaatctacactgcggagagcaaaccagcttgggcttctttttgtttttttctgttattctagatttgttttctttttgtttttgtttatttgtttgtttgcttttatttccagcttgaatgagtggggttgggggcggggtgggcagggttctaccacgtgtaggataatcattcattggtgtgtccaaaaatggggtctgctcctgctaccttgacccttccctttcctctgcttctctcctcatcatcattcccaacaacatcctctgccacacacaacaaaacgtaagtttcatttgggcaaaaattgagcctcacaataaacaccctgaagacacaacttgacttataacatagtgcacagcaagagctacatccaagtgtcctattatctgtgattattttcttaatgacaatgtacatatgcccccatccatgttaattattatctaattccattagggttcacgtcttttctttctgggacactatcctactatatccatatctatagatttcaatatagatgattgtgccatcttctgtagcccctccgctctactcattccttccaccatctgcagagatttgaagtttggggctatgcatgaaacccaacactaaattttgcaagtcaagtgaccaaaaaagggggaggcattttgaagatagaacctctattttaaaaagagaagttcaactcataaacgtgattgataggtggctgatttatttaggttttgtcaagctatctatcaaagtaatggtacagttacccatctactcaaatatctgatttatctcaccatccaattatctacccacctgtcttcctctctagcaatctatttactgtttatcaatctatcaatgtaattgtctaacactcctttctattctctccctactactcactatcaattcatccccatatgaatctctaaccatattgtatctctcccactgtattcatttatacaccatcagcagacattggcatcttcaaaattatctttcaacttctgtgaaagccaacgatctcacaggttaacaaaatacaaaagcaataccctgtgttgtggactctttaaaatctggtatcctatccacccaagggagacactaacagataggccaaagtagcaagctaatgatcagtcactcactattcccggaagagcctgtgttttctaaaacactttcttgggaagcagatcagcctagaaaagttttgattagcactgtggttttccttttgcacttgaaggacaaaggtgccagcctttatgcttctctcaacccttcaagaaagtacatgtcaggaacctatggctggctttccttagcagcaagaacttgagagaaaaacacatctgtctctgcaatgcaaagtgaagagtccacccgcctgagtgggatgacttcagctagagtctcctttctgctccagttctggtttaatctgtttgaaaactatccagtaaaaagctgatggaggccaattacatggcgggtgtattgacaactctggtatttgtttcaggaagctcttctaagctgagggcacttgagcaactgacttaattttcaagcacttgattaacacaacactgcaaacagaagggagaaagtgtcagtgacacagtttcctctgatgcagctgcttctccaatggctttggggaagaacttcaccagctcttcaggttcaaagcagacccagcatacaaacaagagctgagccacctttgctgtcttgtctcctgggacgagaaggactcatccagcaaagttgcctgggattcaaaataaaggcattgcagaccgcacaggtgtgctgcagggactgatccacagagaggatgagaatgcagcatcaatcgcagacctgccctgcctcagttggaaaaccttttcaggccctcagtctaaaaaataaaaaatatgagcacc

SEQ ID NO: 9 - DNA, 3426 bp, homo sapiens
gagcaacctcagcttctagtatccagactccagcgccgccccgggcgcggaccccaaccccgacccagagcttctccagcggcggcgcagcgagcagggctccccgccttaacttcctccgcggggcccagccaccttcgggagtccgggttgcccacctgcaaactctccgccttctgcacctgccacccctgagccagcgcgggcgcccgagcgagtcatggccaacgcggggctgcagctgttgggcttcattctcgccttcctgggatggatcggcgccatcgtcagcactgccctgccccagtggaggatttactcctatgccggcgacaacatcgtgaccgcccaggccatgtacgaggggctgtggatgtcctgcgtgtcgcagagcaccgggcagatccagtgcaaagtctttgactccttgctgaatctgagcagcacattgcaagcaacccgtgccttgatggtggttggcatcctcctgggagtgatagcaatctttgtggccaccgttggcatgaagtgtatgaagtgcttggaagacgatgaggtgcagaagatgaggatggctgtcattgggggtgcgatatttcttcttgcaggtctggctattttagttgccacagcatggtatggcaatagaatcgttcaagaattctatgaccctatgaccccagtcaatgccaggtacgaatttggtcaggctctcttcactggctgggctgctgcttctctctgccttctgggaggtgccctactttgctgttcctgtccccgaaaaacaacctcttacccaacaccaaggccctatccaaaacctgcaccttccagcgggaaagactacgtgtgacacagaggcaaaaggagaaaatcatgttgaaacaaaccgaaaatggacattgagatactatcattaacattaggaccttagaattttgggtattgtaatctgaagtatggtattacaaaacaaacaaacaaacaaaaaacccatgtgttaaaatactcagtgctaaacatggcttaatcttattttatcttctttcctcaatataggagggaagattttaccatttgtattactgcttcccattgagtaatcatactcaaatgggggaaggggtgctccttaaatatatatagatatgtatatatacatgtttttctattaaaaatagacagtaaaatactattctcattatgttgatactagcatacttaaaatatctctaaaataggtaaatgtatttaattccatattgatgaagatgtttattggtatattttctttttcgtccttatatacatatgtaacagtcaaatatcatttactcttcttcattagctttgggtgcctttgccacaagacctagcctaatttaccaaggatgaattctttcaattcttcatgcgtgcccttttcatatacttattttattttttaccataatcttatagcacttgcatcgttattaagcccttatttgttttgtgtttcattggtctctatctcctgaatctaacacatttcatagcctacattttagtttctaaagccaagaagaatttattacaaatcagaactttggaggcaaatctttctgcatgaccaaagtgataaattcctgttgaccttcccacacaatccctgtactctgacccatagcactcttgtttgctttgaaaatatttgtccaattgagtagctgcatgctgttcccccaggtgttgtaacacaactttattgattgaatttttaagctacttattcatagttttatatccccctaaactacctttttgttccccattccttaattgtattgttttcccaagtgtaattatcatgcgttttatatcttcctaataaggtgtggtctgtttgtctgaacaaagtgctagactttctggagtgataatctggtgacaaatattctctctgtagctgtaagcaagtcacttaatctttctacctcttttttctatctgccaaattgagataatgatacttaaccagttagaagaggtagtgtgaatattaattagtttatattactctcattctttgaacatgaactatgcctatgtagtgtctttatttgctcagctggctgagacactgaagaagtcactgaacaaaacctacacacgtaccttcatgtgattcactgccttcctctctctaccagtctatttccactgaacaaaacctacacacataccttcatgtggttcagtgccttcctctctctaccagtctatttccactgaacaaaacctacgcacataccttcatgtggctcagtgccttcctctctctaccagtctatttccattctttcagctgtgtctgacatgtttgtgctctgttccattttaacaactgctcttacttttccagtctgtacagaatgctatttcacttgagcaagatgatgtatggaaagggtgttggcactggtgtctggagacctggatttgagtcttggtgctatcaatcaccgtctgtgtttgagcaaggcatttggctgctgtaagcttattgcttcatctgtaagcggtggtttgtaattcctgatcttcccacctcacagtgatgttgtggggatccagtgagatagaatacatgtaagtgtggttttgtaatttgaaaagtgctatactaagggaaagaattgaggaattaactgcatacgttttggtgttgcttttcaaatgtttgaaaataaaaaaatgttaagaaatgggtttcttgccttaaccagtctctcaagtgatgagacagtgaagtaaaattgagtgcactaaacgaataagattctgaggaagtcttatcttctgcagtgagtatggcccaatgctttctgtggctaaacagatgtaatgggaagaaataaaagcctacgtgttggtaaatccaacagcaagggagatttttgaatcataataactcataaggtgctatctgttcagtgatgccctcagagctcttgctgttagctggcagctgacgctgctaggatagttagtttggaaatggtacttcataataaactacacaaggaaagtcagccaccgtgtcttatgaggaattggacctaataaattttagtgtgccttccaaacctgagaatatatgcttttggaagttaaaatttaaatggcttttgccacatacatagatcttcatgatgtgtgagtgtaattccatgtggatatcagttaccaaacattacaaaaaaattttatggcccaaaatgaccaacgaaattgttacaatagaatttatccaattttgatctttttatattcttctaccacacctggaaacagaccaatagacattttggggttttataatgggaatttgtataaagcattactctttttcaataaattgttttttaatttaaaaaaagg

SEQ ID NO: 10 - DNA, 4960 bp, homo sapiens
gtggctttgggtccccaggattctggatcgtggttgcatctggagagaaaaaaggatcaatcgacacgttttagaagtgtccgtgggtgaataaaaaaggagggggggggtgcaaaactggggttgcggatgcttaaagcaaaaaaagagaaaaggaagcgtcttgaatcctggaacaagaattaccgggtgctcgagatttcaaaaaagcgtctagaaactggtaaatacttggaccatttcagcttgaatttgacggcgaagtgttgtagagaccgtctccttgaatcattgcaaagggaccggggaaagatgagggggctccctctgtggatttatcttgctgagggatatagacctgcagctaactggatttgatttataagagagaaatctgcagtcaatgcccactcttgccacactgctaatatggaaaacagaatgttcaataggatatggtctgataaatagtgatgattgaagatgctgctccaatacatgtgaaatcaatgggagatatctgctgtccgaagatctttcagagcttttctcgacaagctcccctgtaagaaatcggaggtatattctaccattatacagtctttctcaagtggatataaatacgtttgcctcactgtaaccagacaactagacaactaatgtgggaccatggcactgcccagatgcacgtggccaaattatgtttggagagcagtgatggcatgcttggtacaccggggattgggtgccccattgactctctgtatgttgggatgtttgcttcaggctggccatgtgctatcacaaaaattggatgatgtggacccactggtggctaccaactttggaaagataagagggattaagaaggaactcaataatgaaattttggggcctgttattcaatttcttggggttccatatgcagccccaccaacaggggaacgtcgttttcagcctccagaaccaccatctccctggtcagatatcagaaatgccactcaatttgctcctgtgtgtccccagaatatcattgatggcagattgccagaagtcatgcttcctgtgtggtttactaataacttggatgtggtttcatcatatgtgcaagaccagagcgaagactgcctatatttaaatatatatgtcccgactgaggatgatattcgggacagtgggggtcccaaaccagtgatggtgtatatccatggtggctcatatatggaaggtactggaaatttatatgatggaagtgtcttggcaagttatggcaatgtgatcgtcatcacagtcaactatcgacttggagtactcggtttcttgagtacaggcgatcaggctgcaaaggggaactatggactccttgatctcatacaagctttaagatggactagtgaaaacattggattctttggtggtgaccccttaagaatcactgtttttggatctggtgctgggggttcatgtgtcaacctgctgactttatcccattattctgaaggtaaccgttggagcaattcaaccaaaggactttttcaacgagcaatagctcaaagtggaacagccctttccagctgggctgttagttttcaacctgcaaaatatgctagaatgttggccacaaaagttggttgcaatgtttcagatacagtagagttagtggaatgcctacagaagaagccttacaaagaacttgttgaccaagatattcaaccagctcgataccacatagcctttggacctgtgattgatggtgatgtaataccagacgacccccagatattgatggagcaaggagagtttctcaactatgatataatgttaggagtgaaccaaggggaagggttaaaatttgttgaaaatatagtagatagcgatgatggtatatcagctagtgattttgactttgctgtttcaaattttgttgataatttatatggatatcctgaaggcaaagatgttttgagagaaaccattaagttcatgtatactgactgggctgaccgtcataaccctgaaaccagaagaaagacattactggctttgtttacggaccatcagtgggtggcaccagctgtagccacagcggatcttcactcaaactttggttcacctacgtacttctatgccttttaccatcattgccaaacagatcaggttccagcttgggctgatgcagcccacggagacgaggttccctatgtactgggaatccccatgattggccctacagagttatttccttgcaatttctccaaaaatgatgtgatgctgagtgcagttgtaatgacatactggacaaattttgctaaaactggtgacccaaatcaaccagtccctcaagacacgaaattcattcataccaaacccaaccgttttgaagaagtagcatggaccagatattcccagaaagaccaactttatctccatattggattaaaaccaagagttaaagaacattacagagccaataaggtgaacctctggttggagttggtacctcatctgcataatctcaatgacatttctcagtatacctctacaacaactaaagtgccatcaactgacatcactttcagacctacgagaaaaaattctgtacctgtcacgtcagcctttcccactgccaagcaggatgatcccaaacaacaaccaagtccattttcagtggatcaaagggactactcaacagagctgagtgtcactattgcagttggagcatcactgctgtttctgaacatcttggcctttgcagccctgtactacaaaaaggataagaggagacatgatgttcacaggagatgcagccctcagcgcactactaccaatgatctaacccatgcacaagaagaggaaatcatgtccctccaaatgaagcacactgatttggatcatgaatgtgagtccattcatccacatgaggtggttcttcggaccgcctgtcccccagattacacactagctatgaggaggtcacctgatgatgttcccttaatgacacccaacaccattacaatgattcccaacactataccagggattcagcccttacacacattcaatacatttactggaggacagaacaatactctgccccatccccatccccacccccattcacattcaacaaccagggtatagccagataagagaaacaaactattttttttgatggattgcagtaaacgatcactgaagattccttggctttcaacctacaagacttactatttaaataaggaggaatattatgtgaatatacatatcaagaactttgggggttttgaaaaaaatgaattgtatatatacaaatcaactttaaaaacaaatttcaattgcttgaagcaattgttctgaatgatactttttcattcacattcaagaattaattttttgaagatttaagttacataatggaattaggcatgtggaacaccaaacaggaaagaactatgtctgaaatataaaaaataaaaataaaaaaacaactatgaatatgcacaagggacacaccagtggaatgtcagataattttcaccagtttttatttggagccgttttattgtgtagaccatatttacatatttggataagtacacaaagcgtcaatgctgttaatggccttagcaaaggctcatgctgaaatttgccagtaaaacaaagaagtttaaagactggcaggtacaccattatcacataagtgctgtcagtataaagttgtggggataaaggaaactggatatttttagcacgatgtgcatgataatttatatgcttggtggctgtgctgctgattaagccgtaattaaaattcttctcatcccattggagtttttaatagaagcttcctccatcaattggcagaacctaaagaagattttaaggggcaaaagtaattacaataaaataattcacagtagtttcaatatagaaggaattagctattaaaggtatttgaagaaactataggtatagtggtgaatactcgctgatatgaatcccagaaaaaatttcctgtttttaatgttcttttcaatcccatctagataatttatagaaatataaccctaattggacatgtggtagaggatctataagttgctgtgtttttttgttactctgtattttgttccttttggtaaggtgaagtgtgtccaaagagttacttgcaacagtctttcatgatatgaggatgcccccgtattaccactctgattatagttctgagttctttgatttactcatgctgcatgacaaaatgtttactaataacaattcattataaagttatatccctctttacatcacttatctttctcactgaggttcattcactggaatttactcacgcaatctcagtagagtacaacgtagatacagaacctaggagagtcaacatctggaggattttagtctttcttacacatatgtgtgattttaaacgaatattctcagaccacaggaaactcttcatccccctgttgtttaccagtaacagtatatcacagacctttccaaatgtttgtatatgtaatcagatgtacatttatattgaaaaacaaatgagatggacttaaagagcacatcctgataaatactttctctctcacctgtactatatttctattagactaaagttatgtgattttttttttacattttttcagatgactagcaattttgatagtttataagataatgcaaagaactttctctgacaaactaactgcagtaacagaaacctttcttttcagttactctttttcaagaatgaaagattattatacaaaaaattgtatactacttgatggaaccaactttgtacatcttggccatgtcactggtcattgtgtgaaataaagataatctggataatgactattagtccaatgctaagaaacatgatctttgctcattaaagagctaaaatgtttattgctgttttgtctttcttttttct

SEQ ID NO: 11 - DNA, 3213 bp, homo sapiens
ctgcgggcggcgggcggcgggcgcaccatgccctccttcgacgaggcgctgcagcgggtgggcgagttcgggcgcttccagaggcgcgtgtttttgctgctgtgcctgacgggcgtcaccttcgccttcctcttcgtcggcgtggtcttcctgggcacgcagcccgaccactactggtgccgcgggccaagtgccgcggcgctggccgagcgctgcggctggagcccggaggaggagtggaaccgcacggcgcccgcctcccgcggcccagagccccccgagcgccgcggccgctgccagcgctacctcctggaggcggccaacgacagcgcctccgccactagcgctctcagctgcgcggacccactcgccgccttccccaaccgttcggctccccttgtgccgtgccgcggcggctggcgctacgcccaggcccactccaccatcgtcagcgagtttgaccttgtctgtgtcaatgcgtggatgctggacctcacccaagccatcctgaacctcggcttcctgactggagcattcaccttaggctatgcagcagacaggtatggcaggatcgtcatttacttgctatcctgccttggtgttggcgtcactggggttgtggtggcctttgcaccaaacttccctgtgtttgtgatcttccgcttcctgcaaggtgtatttggaaaggggacgtggatgacttgctacgtgattgtgacagaaatagtaggttcgaaacaaaggaggattgtgggaatcgtgattcaaatgttctttacccttggaatcataattctccctggaattgcctacttcatccccaactggcaaggaatccagttagccatcacgctgcccagctttctcttcctcctttattactgggtggtccctgagtctccccgttggctgattactcggaagaaaggagataaagcattacagatcctgagacgcattgctaagtgcaatgggaaatacctctcatcaaattactcagagatcactgttacagatgaggaagttagtaatccatcctttttagatctggtgagaactccccaaatgaggaaatgcacacttattcttatgtttgcttggttcacaagcgcagtggtgtatcaaggacttgtcatgcgcctgggaattatagggggcaacctctatatagactttttcatctcgggcgtggtggaactgccaggagctctcttgatcttactaaccattgagcgccttggacgacgcctcccctttgcggcaagcaatatagtggcaggggtggcatgccttgtcactgcgttcttaccagaaggaatagcatggttgaggaccacagtggctacattgggaagactagggataaccatggcctttgaaattgtttatttggtaaattcagaattgtacccaacaacattacgaaatttcggagtttcgctctgttcaggtctgtgtgattttgggggaatcatagccccatttctgctctttcggctagcagccgtgtggctagaactacctctgatcatctttggtatcctggcatccatctgtggtggccttgtgatgcttttgcctgaaaccaagggtattgccttgccagagacagtggatgatgtagaaaaacttggcagtccacattcctgtaaatgtggcaggaataagaaaaccccagtttcccgctctcacctttgaggcccccgacaaagacagaaagaaggagctatccaggagctgatcctccttgcaaagctgtgccttgcagagatgcacgtgtgcatttcagctacatcatgccgcgctgttgtaatactgtataaagacctcaatctatccagagtatttttatataatgttggatgagttaggatttgtaatgctgttgaagtttctgggaacacataatatgtagccagtttaacaaagaagctgtcaggtgcacagcccttcctgggtttttttcttgtgttccctgtggtctctgacccattaggctaaagagagacaagagaagcccccaacctgattctcatgacagctccatcaagaatgtgggatgtgccgaccaaggatttgagaaagttgtacagaaatgtgttcatcaaatctggtcaagggactaagctcctagctgaccattcattctgaagattgcatggaggatgaacatctgggaatcctgttaatgagaaggctgaatcacaggcacctgggccaaagggtgtgagcattcatgttctctgctcaccttggtttccgcacaccttcgcaatgtgaacaggtcaggagtccctcccgtccacctcctctgtaacagctggggttccaggcatggtttaggccctgttccagcaataagaaccaatctgctgtacaatctgaggacttggctgtgttatttacaaaatgatgctgtggttctgagattatttgggacatttttggctctcctttagtggacacctagagccacagattcccttctttactaaacaaatcccatggattctgatttctgggtcttaggattttaaaagtgaagggatatttttcttatatttgtgagttcagttccgatggtgcccgtggtcaaaagcgaaaaacatggacaattcctattcattcttagcactttgacatgtcttggggaaaagctttacattttaatttaaaagaaagatcaattatatccatgcttaacaggatcagcaggagctttataaatgactttacagagactaataagggattgatctttctttttttgttatcgaggcttttgaaatgtggaacttgtgtgttctgctttatatgttatattcaatatcttttcagatgcagtctatattttatgctgagttttaaaaatgaaatactttatgcaaacaggcaaaattggtaccaaagggaaacattaaccatgaggaagagcatttttctaaggagaacaggtgacaatatacacatgtcgcgtaatcgtaaaatgagcatcttagtctttaaaacacatcagaattgaatacgaataatctatttgtcgatgaaataaacacaactctttgaggatttgagactacattcaccctttattcacagtcacttgcagttttgcttttctctccatttctctgctgtaagatgactgttgcattgttgaattgtattttgagtggatatttttgtttggtaacaattaaaattttaaatcgt

SEQ ID NO: 12 - DNA, 615 bp, homo sapiens
gactgcaagatggaggaaggcgggaacctaggaggcctgattaagatggtccatctactggtcttgtcaggtgcctggggcatgcaaatgtgggtgaccttcgtctcaggcttcctgcttttccgaagccttccccgacataccttcggactagtgcagagcaaactcttccccttctacttccacatctccatgggctgtgcttcatcaacctctgcatcttggcttcacagcatgcttgggctcagctcacattctgggaggccagccagctttacctgctgttcctgagccttacgctggccactgtcaacgcccgctggctggaacccccaccacagctgccatgtgggccctgcaaaccgtggagaaggagcgaggcctgggtggggaggtaccaggcagccaccagggtcccgatccctaccgccagctgcgagagaaggaccccaagtacagtgcttccgccagaatttcttccgctaccatgggctgtcctctctttgcaatctgggctgcgtcctgagcaatgggctctgtctcgctggccttgccctggaaataaggagcctctagcatgggccctgcatgctaataaatgcttcttcagaaatg

SEQ ID NO: 13 - DNA, 713 bp, homo sapiens
gatggaggaaggcgggaacctaggaggcctgattaagatggtccatctactggtcttgtcaggtgcctggggcatgcaaatgtgggtgaccttcgtctcaggtagggaccctcagcttggatgtcatgggtacctggggtggggatggaaataagaggggaaccgggaagtgccctaacacccctgtggtccccataccctgcaggcttcctgcttttccgaagccttccccgacataccttcggactagtgcagagcaaactcttccccttctacttccacatctccatgggctgtgccttcatcaacctctgcatcttggcttcacagcatgcttgggctcagctcacattctgggaggccagccagctttacctgctgttcctgagccttacgctggccactgtcaacgcccgctggctggaaccccgcaccacagctgccatgtgggccctgcaaaccgtggagaaggagcgaggcctgggtggggaggtaccaggcagccaccagggtcccgatccctaccgccagctgcgagagaaggaccccaagtacagtgctctccgccagaatttcttccgctaccatgggctgtcctctctttgcaatctgggctgcgtcctgagcaatgggctctgtctcgctggccttgccctggaaataaggagcctctagcatgggccctgcatgctaataaatgcttcttcagaatg

SEQ ID NO: 14 - DNA, 546 bp, homo sapiens
atggaggaaggcgggaacctaggaggcctgattaagatggtccatctactggtcttgtcaggtgcctggggcatgcaaatgtgggtgaccttcgtctcaggcttcctgcttttccgaagccttccccgacataccttcggactagtgcagagcaaactcttccccttctacttccacatctccatgggctgtgccttcatcaacctctgcatcttggcttcacagcatgcttgggctcagctcacattctgggaggccagccagctttacctgctgttcctgagccttacgctggccactgtcaacgcccgcctgggtggggaggtaccaggcagccaccagggtcccgatccctaccgccagctgcgagagaaggaccccaagtacagtgctctccgccagaatttcttccgctaccatgggctgtcctctctttgcaatctgggctgcgtcctgagcaatgggctctgtctcgctggccttgccctggaaataaggagcctctagcatgggccctgcatgctaataaatgcttcttcagaaatg

SEQ ID NO: 15 - DNA, 1177 bp, homo sapiens
ccgagactcacggtcaagctaaggcgaagagtgggtggctgaagccatactattttatagaattaatggaaagcagaaaagacatcacaaaccaagaagaactttggaaaatgaagcctaggagaaatttagaagaagacgattatttgcataaggacacgggagagaccagcatgctaaaaagacctgtgcttttgcatttgcaccaaacagcccatgctgatgaatttgactgcccttcagaacttcagcacacacaggaactctttccacagtggcacttgccaattaaaatagctgctattatagcatctctgacttttctttacactcttctgagggaagtaattcaccctttagcaacttcccatcaacaatatttttataaaattccaatcctggtcatcaacaaagtcttgccaatggtttccatcactctcttggcattggtttacctgccaggtgtgatagcagcaattgtccaacttcataatggaaccaagtataagaagtttccacattggttggataagtggatgttaacaagaaagcagtttgggcttctcagtttcttttttgctgtactgcatgcaatttatagtctgtcttacccaatgaggcgatcctacagatacaagttgctaaactgggcatatcaacaggtccaacaaaataaagaagatgcctggattgagcatgatgtttggagaatggagatttatgtgtctctgggaattgtgggattggcaatactggctctgttggctgtgacatctattccatctgtgagtgactctttgacatggagagaatttcactatattcagagcaagctaggaattgtttcccttctactgggcacaatacacgcattgatttttgcctggaataagtggatagatataaaacaatttgtatggtatacacctccaacttttatgatagctgttttccttccaattgttgtcctgatatttaaaagcatactattcctgccatgcttgaggaagaagatactgaagattagacatggttgggaagacgtcaccaaaattaacaaaactgagatatgttcccagttgtagaattactgtttacacacatttttgttcaatattgatatattttatcaccaacatttcaagtttgtatttgttaataaaatgattattcaagg

SEQ ID NO: 16 - DNA, 1864 bp, homo sapiens
cccagagcaagccgattctctacacactgccttcccttcctgtaagactcatcaaaaaggcaccccaaccttgcatggatctgctgttggtattccttggggtgaagccagaagtcaggctttccacagagagacgggactacatggccacctgggaaggctagggagtcaaagggcctgaggaatgactacttccctccacaagggcattccctgccctgctctgcttcctgggggcttcagcaagccttccttctagagctcctagaaccctcccatggtcaacacaacagcagcccagacaatgagatgcaagaggcctgagctcacaggccattcaggtcttctagatgccttcttgaggctgcttgtggccacccacagacacttgtaaggaggagagaagtcagcctggcagagagactctgaaatgagggattagaggtgttcaaggagcaagagcttcagcctgaagacaagggagcagtccctgaagacgcttctactgagaggtctgccatggcctctcttggcctccaacttgtgggctacatcctaggccttctggggcttttgggcacactggttgccatgctgctccccagctggaaaacaagttcttatgtcggtgccagcattgtgacagcagttggcttctccaagggcctctggatggaatgtgccacacacagcacaggcatcacccagtgtgacatctatagcacccttctgggcctgcccgctgacatccaggctgcccaggccatgatggtgacatccagtgcaatctcctccctggcctgcattatctctgtggtgggcatgagatgcacagtcttctgccaggaatcccgagccaaagacagagtggcggtagcaggtggagtctttttcatccttggaggcctcctgggattcattcctgttgcctggaatcttcatgggatcctacgggacttctactcaccactggtgcctgacagcatgaaatttgagattggagaggctctttacttgggcattatttcttccctgttctccctgatagctggaatcatcctctgcttttcctgctcatcccagagaaatcgctccaactactacgatgcctaccaagcccaacctcttgccacaaggagctctccaaggcctggtcaacctcccaaagtcaagagtgagttcaattcctacagcctgacagggtatgtgtgaagaaccaggggccagagctggggggtggctgggtctgtgaaaaacagtggacagcaccccgagggccacaggtgagggacactaccactggatcgtgtcagaaggtgctgctgaggatagactgactttggccattggattgagcaaaggcagaaatgggggctagtgtaacagcatgcaggttgaattgccaaggatgctcgccatgccagcctttctgttttcctcaccttgctgctcccctgccctaagtccccaaccctcaacttgaaaccccattcccttaagccaggactcagaggatccctttgccctctggtttacctgggactccatccccaaacccactaatcacatcccactgactgaccctctgtgatcaaagaccctctctctggctgaggttggctcttagctcattgctggggatgggaaggagaagcagtggcttttgtgggcattgctctaacctacttctcaagcttccctccaaagaaactgattggccctggaacctccatcccactcttgttatgactccacagtgtccagactaatttgtgcatgaactgaaataaaaccatcctacggtatccagggaacagaaagcaggatgcaggatgggaggacaggaaggcagcctgggacattt

SEQ ID NO: 17 - DNA, 4287 bp, homo sapiens
gtctctgctgacctcatgccacagtacaacatgttcaaatctgggagaaacctgagggttattcggcatattcctcctcctcctctctcacaagcatggagccctcactctcctcggaaaccatcgaacggttggaagtaagcagccttgcccaaacatccagtgcagtggcctccagtaccgatggcagcatccacacagactctgtggatggaacaccagaccctcagcgcacaaaggctgccattgctcacctgcagcagaagatcctgaagctcacagaacaaatcaagattgcacaaacagcccgggacgacaacgttgctgaatacttgaagcttgccaacagtgcagacaaacagcaggctgcccgcatcaagcaagtctttgagaagaagaaccagaaatctgcccaaactatcctccagctgcaaaagaaacttgagcactaccacaggaagctcagagaggtagagcagaatgggatcccccggcagccaaaggatgtcttcagggacatgcaccagggtctgaaggatgtaggagcaaaggtgactggcttcagtgaaggtgtggtggatagtgtcaaaggtgggttttccagcttctcccaggccacccattcagcagcaggcgctgtagtctcaaagcccagagagattgcctcactcattcggaacaaatttggcagtgcagacaacatccccaacctgaaggactctttagaggaagggcaagtggatgatgcggggaaggctttgggagtgatttcaaactttcagtctagcccaaaatatggtagtgaagaagattgttctagtgccacttcaggctcagtgggagccaacagcaccacagggggcatcgctgtaggagcatccagctccaaaacaaacaccctggacatgcagagctcaggatttgatgcactactacatgagatccaggagatccgggaaacccaggccagactagaggaatcctttgagactctcaaggaacattatcagagggactattccttaataatgcagaccttacaggaggagcgatatagatgtgaacgattggaagaacagctaaatgacctaacagagctccaccagaatgaaatcttgaacttgaagcaggaactggcaagcatggaagaaaaaatcgcgtatcagtcctatgaacgggcccgggacatccaggaggccctggaggcatgccagacgcgcatctccaagatggagctgcagcagcagcagcagcaggtggtgcagctagaagggctggagaatgccactgcccggaaccttctgggcaaactcatcaacatcctcctggctgtcatggcagtccttttggtctttgtctccactgtagccaactgtgtggtccccctcatgaagactcgcaacaggacgttcagcactttattccttgtggtttttattgcctttctctggaagcactgggacgccctcttcagctatgtggaacggttcttttcatcccctagatgatgctggcacagaaggcattgttccctaccctctggcgagtgcatgcagcagagagttagacagcaacttacctactctgaagttttctacaacaaaaaaagagttgagtgaatctgtttacatttagaataatgtttttttcttcaagagacgcaattgcaatagtattttttagattttatccaagaagttttttgggcgaaaatcttggatcatttttatgtagcatgattttccttgggatgcaaatcttaaaacagtcctttaatatgaaccaacaatctggagcacaccgaagggcaatctaaattgtggcttgaaggactgcactaaaacccactaaaaagatgcgaaaacctgatgagggcaaaccagttaaacctaacaccctgccttgtctgggctcatcacctctccctatcccagactaactttactgtgaaatcctaccacattccatgtctgaatttttggattcggggtggattttcgttgtccgtggaagaacacatggatctctctggctttctcacccaagttggccacttacgctaatcctggaagtatgatcacttttgaacctgccccttaaccttgacgaggatacaaaagtgaaagcatcatcccccaaaggatcactgcacagtcctactacagtatttttaagtagccctctaaatacttaattttaagcaaaatcccttggccgcacttttaaggtttttttatatgtgtatagttaccaacctaaaaataaaaaatccgaacagcatacttgaagaatgtaatactcaaactctcagtgcttccttatggtttctaataggattttttattattgttattattattattgggtttttttggacagggttgggagggtcttttatttttcctttgaaataaagaagtgatgtttttaaatgaagaaatgtgtggatatttaagtgtgctgctccctcttgtcttgaaacagtttgagtaagaaagtcttgctgtaaatgctgccctctgccgcctttgttttgagatgcagtttaaactccctctggctgctgctgctgctttttggtgtcccgacatacctacgcccccgttttatgggtttggcttagttgaagaggaaagggttgtgcaaggagagcaggaggctgtttccaaaaaccagtgtagtaggatagggatttttttttttttttttgccccaagaaaacgttcacccagtgatcttgggctggggttgtctttaggaaaagttgagactataagagtcataaataagtccttgtgtttccttaatttattttgttaacacccctaattacaaccaaagtgatgatgtggagtcttctgtcttcattttggccccagcattcttaatttcaaagctttattctgtctgcctaagagaatcaaccaaaggtgattctcctaaagagcagtgaaggaaatgtcaggttagcaggacccaagttttgggtgtgaaatgttgccagcttcctataatgtaaacggacttgttaacctaacctaattatgctcagtggacttctatagatggttttgaaaaatgaactgagctgccttcccgcatcgcataaccagttccatcatcctggtggaacttgaacatttagagtttatctagagagcttggttaatctttccatattatttgtagtattggtcacaaatgctgttccctcttagcctcattctgtgcaaccaagtgcatataagatgccctgaaaagagtaacaaagtatgctttgcctgtttccacttaccaggaaattccttcagaactagattagcattgccctgcctgtctgaaaggacagtttacctaatggtgccagcctccttttgctttggcaagctggatttctcagagccagcatgttgtttccataactactttgatattttaactcaggtactccagtcttcaccccaacctcagctgattgtagtacacctgctagctctgttgccccctcaaaactgcacccagagcagggccacaagggtgctttttttctttaaaaaaaaaaaaattagaaccaattcatgttcatgccaaaaacaaattgtccccaagcctatatgtattaaaatgttaactttgcctaaaaatattgcagtgactttttaggcaggagtgccaaaggacactatgaactttttgaactgacagtttctcctaactttctgctttagcgtaattgctcagagtagagagcccccacaaagttatttaaaagatgccctagcagcaatccaccagtttttctaagctagaacctttgagtcccccaaactgcctgaagacttaagttttgtgggcactggaagtcactttgatagatggattgaaactgttcctatttgccctgggacggtttctatctatcaaaggaaggttttcacctgtagaaagccccctgcctccagccaaatagtcccatgctgactttctatcttcctttctcaaactgtcttaggaaggaccttcagtgcagatcaggtgcagtaatggctttcttgtcccttaattattcaccagacccagaagttgtacgcatttaatgctgtttgtaaccatgcatctgttttcattctttgctgtaccttttgctgcccatcctgttacttttgagtttctttcattgtggttgttcttgggttcttttgtcttgtcagagctcttctataacctcgctctaatggcttaacagttgttctgggtggaaacgtcccctcatttgaatgctcctct

SEQ ID NO: 18 - DNA, 2102 bp, homo sapiens
ccgctgggcgtagctgcgactcggcggagtcccggcggcgcgtccttgttctaacccggcgcgccatgaccgtcgcgcggccgagcgtgcccgcggcgctgcccctcctcggggagctgccccggctgctgctgctggtgctgttgtgcctgccggccgtgtggggtgactgtggccttcccccagatgtacctaatgcccagccagctttggaaggccgtacaagttttcccgaggatactgtaataacgtacaaatgtgaagaaagctttgtgaaaattcctggcgagaaggactcagtgatctgccttaagggcagtcaatggtcagatattgaagagttctgcaatcgtagctgcgaggtgccaacaaggctaaattctgcatccctcaaacagccttatatcactcagaattattttccagtcggtactgttgtggaatatgagtgccgtccaggttacagaagagaaccttctctatcaccaaaactaacttgccttcagaatttaaaatggtccacagcagtcgaattttgtaaaaagaaatcatgccctaatccgggagaaatacgaaatggtcagattgatgtaccaggtggcatattatttggtgcaaccatctccttctcatgtaacacagggtacaaattatttggctcgacttctagtttttgtcttatttcaggcagctctgtccagtggagtgacccgttgccagagtgcagagaaatttattgtccagcaccaccacaaattgacaatggaataattcaaggggaacgtgaccattatggatatagacagtctgtaacgtatgcatgtaataaaggattcaccatgattggagagcactctatttattgtactgtgaataatgatgaaggagagtggagtggcccaccacctgaatgcagaggaaaatctctaacttccaaggtcccaccaacagttcagaaacctaccacagtaaatgttccaactacagaagtctcaccaacttctcagaaaaccaccacaaaaaccaccacaccaaatgctcaagcaacacggagtacacctgtttccaggacaaccaagcattttcatgaaacaaccccaaataaaggaagtggaaccacttcaggtactacccgtcttctatctgggcacacgtgtttcacgttgacaggtttgcttgggacgctagtaaccatgggcttgctgacttagccaaagaagagttaagaagaaaatacacacaagtatacagactgttcctagtttcttagacttatctgcatattggataaaataaatgcaattgtgctcttcatttaggatgctttcattgtctttaagatgtgttaggaatgtcaacagagcaaggagaaaaaaggcagtcctggaatcacattcttagcacacctacacctcttgaaaatagaacaacttgcagaattgagagtgattcctttcctaaaagtgtaagaaagcatagagatttgttcgtatttagaatgggatcacgaggaaaagagaaggaaagtgatttttttccacaagatctgtaatgttatttccacttataaaggaaataaaaaatgaaaaacattatttggatatcaaaagcaaataaaaacccaattcagtctcttctaagcaaaattgctaaagagagatgaaccacattataaagtaatctttggctgtaaggcattttcatctttccttcgggttggcaaaatattttaaaggtaaaacatgctggtgaaccaggggtgttgatggtgataagggaggaatatagaatgaaagactgaatcttcctttgttgcacaaatagagtttggaaaaagcctgtgaaaggtgtcttctttgacttaatgtctttaaaagtatccagagatactacaatattaacataagaaaagattatatattatttctgaatcgagatgtccatagtcaaatttgtaaatcttattcttttgtaatatttatttatatttatttatgacagtgaacattctgattttacatgtaaaacaagaaaagttgaagaagatatgtgaagaaaaatgtatttttcctaaatagaaataaatgatcccattttttggt

SEQ ID NO: 19 - DNA, 2716 bp, homo sapiens
ggcacgaggcgctgcgcggcgcggcggccgggccctcgagacggggacggacacaccagcccctcggataccacttggccactcccgctgaggccactcccactgcgtggctgaagcctcgaggtcaccaggcggaggcgcggagatgcccctgcatcagctgggggacaagccgctcaccttccccagccccaactcagccatggaaaacgggcttgaccacaccccacccagcaggagggcatccccgggcacacccctgagccccggctccctccgctccgctgcccatagccccctggacaccagcaagcagcccctctgccagctctgggccgagaagcatggcgcccgggggacccatgaggtgcggtacgtctcggccgggcagagcgtggcgtgcggctggtgggccttcgcaccgccgtgcctgcaggtcctcaacacgcccaagggcatcctgttcttcctgtgtgcggccgcattcctgcaggggatgactgtgaatggcttcatcaacacagtcatcacctccctggagcgccgctatgacctgcacagctaccagagcgggctcatcgccagctcctacgacattgccgcctgcctctgcctcaccttcgtcagctacttcgggggctcagggcacaagccgcgctggctgggctggggcgtgctgcttatgggcacggggtcgctggtgttcgcgctgccccacttcacggctggccgctatgaggtggagttggacgcgggtgtcaggacgtgccctgccaaccccggcgcggtgtgtgcggacagcacctcgggcctgtcccgctaccagctggtcttcatgctgggccagttcctgcatggcgtgggtgccacacccctctacacgctgggcgtcacctacctggatgagaacgtcaagtccagctgctcgcccgtctacattgccatcttctacacagcggccatcctgggcccagctgccggctacctgattggaggtgccctgctgaatatctacacggaaatgggccgacggacggagctgaccaccgagagcccactgtgggtcggcgcctggtgggtcggcttcctgggctctggggccgctgctttcttcaccgccgttcccatccttggttaccctcggcagctgccaggctcccagcgctacgcggtcatgagagcggcggaaatgcaccagttgaaggacagcagccgtggggaggcgagcaacccggactttgggaaaaccatcagagacctgcctctctccatctggctcctgctgaagaaccccacgttcatcctgctctgcctggccggggccaccgaggccactctcatcaccggcatgtccacgttcagccccaagttcttggagtcccagttcagcctgagtgcctcagaagctgccaccttgtttgggtacctggtggtgccagcgggtggtggcggcaccttcctgggcggcttctttgtgaacaagctcaggctccggggctccgcggtcatcaagttctgcctgttctgcaccgttgtcagcctgctgggcatcctcgtcttctcactgcactgccccagtgtgcccatggcgggcgtcacagccagctacggcgggagcctcctgcccgaaggccacctgaacctaacggctccctgcaacgctgcctgcagctgccagccagaacactacagccctgtgtgcggctcggacggcctcatgtacttctcactgtgccacgcagggtgccctgcagccacggagacgaatgtggacggccagaaggtgtaccgagactgtagctgtatccctcagaatctttcctctggttttggccatgccactgcagggaaatgcacttcaacttgtcagagaaagcccctccttctggttttcatattcgttgtaattttctttacattcctcagcagcattcctgcactaacggcaactctacgatgtgtccgtgaccctcagagatcctttgccctgggaatccagtggattgtagttagaatactagggggcatcccggggcccatcgccttcggctgggtgatcgacaaggcctgtctgctgtggcaggaccagtgtggccagcagggctcctgcttggtgtaccagaattcggccatgagccgctacatactcatcatggggctcctgtacaaggtgctgggcgtcctcttctttgccatagcctgcttcttatacaagcccctgtcggagtcttcagatggcctggaaacttgtctgcccagccagtcctcagcccctgacagtgccacagatagccagctccagagcagcgtctgaccaccgcccgcgcccacccggccacggcgggcactcagcatttcctgatgacagaacagtgccgttgggtgatgcaatcacacgggaacttctatttgacctgcaaccttctacttaacctgtggtttaaagtcggctgtgacctcctgtccccagagctgtacggccctgcagtgggtgggaggaacttgcataaatatatatttatggacacacagtttgcatcagaacgtgtttatagaatgtgttttatacccgatcgtgtgtggtgtgcgtgaggacaaactccgcaggggctgtgaatcccactgggagggcggcgggcctgcagcccgaggaaggcttgtgtgtcctcagttaaaactgtgcatatcgaaatatattttgttatttaagcctgcg

SEQ ID NO: 20 - DNA, 4098 bp, homo sapiens
ggtggcctctgtggccgtccaggctagcggcggcccgcaggcggcggggagaaagactctctcacctggtcttgcggctgtggccaccgccggccaggggtgtggagggcgtgctgccggagacgtccgccgggctctgcagttccgccgggggtcgggcagctatggagccgcggcccacggcgccctcctccggcgccccgggactggccggggtcggggagacgccgtcagccgctgcgctggccgcagccagggtggaactgcccggcacggctgtgccctcggtgccggaggatgctgcgcccgcgagccgggacggcggcggggtccgcgatgagggccccgcggcggccggggacgggctgggcagacccttggggcccaccccgagccagagccgtttccaggtggacctggtttccgagaacgccgggcgggccgctgctgcggcggcggcggcggcggcggcagcggcggcggctggtgctggggcgggggccaagcagacccccgcggacggggaagccagcggcgagagcgagccagctaaaggcagcgaggaagccaagggccgcttccgcgtgaacttcgtggacccagctgcctcctcgtcggctgaagacagcctgtcagatgctgccggggtcggagtcgacgggcccaacgtgagcttccagaacggcggggacacggtgctgagcgagggcagcagcctgcactccggcggcggcggcggcagtgggcaccaccagcactactattatgatacccacaccaacacctactacctgcgcaccttcggccacaacaccatggacgctgtgcccaggatcgatcactaccggcacacagccgcgcagctgggcgagaagctgctccggcctagcctggcggagctccacgacgagctggaaaaggaaccttttgaggatggctttgcaaatggggaagaaagtactccaaccagagatgctgtggtcacgtatactgcagaaagtaaaggagtcgtgaagtttggctggatcaagggtgtattagtacgttgtatgttaaacatttggggtgtgatgcttttcattagattgtcatggattgtgggtcaagctggaataggtctatcagtccttgtaataatgatggccactgttgtgacaactatcacaggattgtctacttcagcaatagcaactaatggatttgtaagaggaggaggagcatattatttaatatctagaagtctagggccagaatttggtggtgcaattggtctaatcttcgcctttgccaacgctgttgcagttgctatgtatgtggttggatttgcagaaaccgtggtggagttgcttaaggaacattccatacttatgatagatgaaatcaatgatatccgaattattggagccattacagtcgtgattcttttaggtatctcagtagctggaatggagtgggaagcaaaagctcagattgttcttttggtgatcctacttcttgctattggtgatttcgtcataggaacatttatcccactggagagcaagaagccaaaagggttttttggttataaatctgaaatatttaatgagaactttgggcccgattttcgagaggaagagactttcttttctgtatttgccatcttttttcctgctgcaactggtattctggctggagcaaatatctcaggtgatcttgcagatcctcagtcagccatacccaaaggaacactcctagccattttaattactacattggtttacgtaggaattgcagtatctgtaggttcttgtgttgttcgagatgccactggaaacgttaatgacactatcgtaacagagctaacaaactgtacttctgcagcctgcaaattaaactttgatttttcatcttgtgaaagcagtccttgttcctatggcctaatgaacaacttccaggtaatgagtatggtgtcaggatttacaccactaatttctgcaggtatattttcagccactctttcttcagcattagcatccctagtgagtgctcccaaaatatttcaggctctatgtaaggacaacatctacccagctttccagatgtttgctaaaggttatgggaaaaataatgaacctcttcgtggctacatcttaacattcttaattgcacttggattcatcttaattgctgaactgaatgttattgcaccaattatctcaaacttcttccttgcatcatatgcattgatcaatttttcagtattccatgcatcacttgcaaaatctccaggatggcgtcctgcattcaaatactacaacatgtggatatcacttcttggagcaattctttgttgcatagtaatgttcgtcattaactggtgggctgcattgctaacatatgtgatagtccttgggctgtatatttatgttacctacaaaaaaccagatgtgaattggggatcctctacacaagccctgacttacctgaatgcactgcagcattcaattcgtctttctggagtggaagaccacgtgaaaaactttaggccacagtgtcttgttatgacaggtgctccaaactcacgtccagctttacttcatcttgttcatgatttcacaaaaaatgttggtttgatgatctgtggccatgtacatatgggtcctcgaagacaagccatgaaagagatgtccatcgatcaagccaaatatcagcgatggcttattaagaacaaaatgaaggcattttatgctccagtacatgcagatgacttgagagaaggtgcacagtatttgatgcaggctgctggtcttggtcgtatgaagccaaacacacttgtccttggatttaagaaagattggttgcaagcagatatgagggatgtggatatgtatataaacttatttcatgatgcttttgacatacaatatggagtagtggttattcgcctaaaagaaggtctggatatatctcatcttcaaggacaagaagaattattgtcatcacaagagaaatctcctggcaccaaggatgtggtagtaagtgtggaatatagtaaaaagtccgatttagatacttccaaaccactcagtgaaaaaccaattacacacaaagttgaggaagaggatggcaagactgcaactcaaccactgttgaaaaaagaatccaaaggccctattgtgcctttaaatgtagctgaccaaaagcttcttgaagctagtacacagtttcagaaaaaacaaggaaagaatactattgatgtctggtggctttttgatgatggaggtttgaccttattgataccttaccttctgacgaccaagaaaaaatggaaagactgtaagatcagagtattcattggtggaaagataaacagaatagaccatgaccggagagcgatggctactttgcttagcaagttccggatagacttttctgatatcatggttctaggagatatcaataccaaaccaaagaaagaaaatattatagcttttgaggaaatcattgagccatacagacttcatgaagatgataaagagcaagatattgcagataaaatgaaagaagatgaaccatggcgaataacagataatgagcttgaactttataagaccaagacataccggcagatcaggttaaatgagttattaaaggaacattcaagcacagctaatattattgtcatgagtctcccagttgcacgaaaaggtgctgtgtctagtgctctctacatggcatggttagaagctctatctaaggacctaccaccaatcctcctagttcgtgggaatcatcagagtgtccttaccttctattcataaatgttctatacagtggacagccctccagaatggtacttcagtgcctagtgtagtaacctgaaatcttcaatgacacattaacatcacaatggcgaatggtgacttttctttcacgatttcattaatttgaaagcacacaggaaagcttgctccattgataacgtgtatggagacttcggttttagtcaattccatatctcaatcttaatggtgattcttctctgttgaactgaagtttgtgagagtagttttcctttgctacttgaatagcaataaaagcgtgttaactttttgg

SEQ ID NO: 21 - DNA, 8186 bp, homo sapiens
  misc_feature (6899)..(6899): n=unknown
  misc_feature (7155)..(7155): n=unknown
  misc_feature (7184)..(7184): n=unknown
  misc_feature (7957)..(7957): n=unknown
gaattcagaattttagaccctttggccttggggtccatcctggagaccctgaggtctaagctacagcccctcagccaaccacagacccttctctggctcccaaaaggagttcagtcccagagggtggtcacccacccttcagggatgagaagttttcaaggggtattactcaggcactaaccccaggaaagatgacagcacattgccataaagttttggttgttttctaagccagtgcaactgcttattttagggattttccgggatagggtggggaagtggaaggaatcggcgagtagaagagaaagcctgggagggtggaagttagggatctaggggaagtttggctgatttggggatgcgggtgggggaggtgctggatggagttaagtgaaggatagggtgcctgagggaggatgcccgaagtcctcccagacccacttactcacggtggcagcggcgacactccagtctatcaaagatccgccgggatggagagccaggaggcgggggctgcccctgaggtagcggggaggccggggggccggggggcggacgggacgagtgcaatattggcgggggaaaaaacaacactgcaccgcgtcccgtccctcccgcccgcccgggcccggatcccgctccccaccgcctgaagccggcccgacccggaacccgggccgctggggagttgggttcaccttggaggccagagagacttggcgcccggaagcaaagggaatggcaagggggaggggggagggagaacgggagtttgcggagtccagaaggccgctttccgacgcccgggcgttgcgcgcgcttgctctttaagtactcagactgcgcggcgcgagccgtccgcatggtgacgcgtgtcccagcaaccgaactgaatggctgttgcttggcaatgccgggagttgaggtttggggccgcccacctagctactcgtgttttctccggcctgcgagttggggggctcccgcctccccggcccgctcctgggcgcgctgacgtcagatgtccccaccccgcccagcgcctgccccaagggtctcgccgcacacaaagctcggcctcgggcgccggcgcgcgggcgagagcggtggtctctcgcctgctgatctgatgcgctccaatcccgtgcctcgccgaagtgtttttaaagtgttctttccaacctgtgtctttggggctgagaactgttttctgaatacaggcggaactgcttccgtcggcctagaggcacgctgcgactgcgggacccaagttccacgtgctgccgcggcctgggatagcttcctcccctcgtgcactgctgccgcacacacctcttggctgtcgcgcattacgcacctcacgtgtgcttttgccccccgctacgtgcctacctgtccccaataccactctgctccccaaaggatagttctgtgtccgtaaatcccattctgtcaccccacctactctctgccccccccttttttgttttgagacggagctttgctctgtcgcccaggctggagtgcaatggcgcgatctcggctcactgcaacctccgcctcccgggttcaagcgattctcctgcctcagcctcctgagtagctggggttacagcgcccgccaccacgctcggctaatttttgtagtttttagtagagacgaggtttcaccatcttggccaggctggtcttgaacccctgaccttgtgatccactcgcctcggccttccaaagtgttgggattacgggcgtgacgaccgtgccacgcatctgcctcttaagtacataacggcccacacagaacgtgtccaactcccccgcccacgttccaacgtcctctcccacatacctcggtgccccttccacatacctcaggaccccacccgcttagctccatttcctccagacgccaccaccacgcgtcccggagtgccccctcctaaagctcccagccgtccaccatgctgtgcgttcctccctccctggccacggcagtgacccttctctcccgggccctgcttccctctcgcgggctctgctgcctcacttaggcagcgctgcccttactcctctccgcccggtccgagcggcccctcagcttcggcgcccagccccgcaaggctcccggtgaccactagagggcgggaggagctcctggccagtggtggagagtggcaaggaaggaccctagggttcatcggagcccaggtttactcccttaagtggaaatttcttcccccactcctccttggctttctccaaggagggaacccaggctgctggaaagtccggctgggggggggactgtgggttcaggggagaacggggtgtggaacgggacagggagcggttagaagggtggggctattccgggaagtggtggggggagggagcccaaaactagcacctagtccactcattatccagccctcttatttctcggccgctctgcttcagtggacccggggagggcggggaagtggagtgggagacctaggggtgggcttcccgaccttgctgtacaggacctcgacctagctggctttgttccccatccccacgttagttgttgccctgaggctaaaactagagcccaggggccccaagttccagactgcccctcccccctcccccggagccagggagtggttggtgaaagggggaggccagctggagaacaaacgggtagtcagggggttgagcgattagagcccttgtaccctacccaggaatggttggggaggaggaggaagaggtaggaggtaggggagggggcggggttttgtcacctgtcacctgctcgctgtgcctagggcgggcgggcggggagtggggggaccggtataaagcggtaggcgcctgtgcccgctccacctctcaagcagccagcgcctgcctgaatctgttctgccccctccccacccatttcaccaccaccatgacaccgggcacccagtctcctttcttcctgctgctgctcctcacagtgcttacaggtgaggggcacgaggtggggagtgggctgccctgcttaggtggtcttcgtggtctttctgtgggttttgctccctggcagatggcaccatgaagttaaggtaagaattgcagacagaggctgccctgtctgtgccagaaggagggagaggctaaggacaggctgagaagagttgcccccaaccctgagagtgggtaccaggggcaagcaaatgtcctgtagagaagtctagggggaagagagtagggagagggaaggcttaagaggggaagaaatgcaggggccatgagccaaggcctatgggcagagagaaggaggctgctgcagggaaggaggcttccaacccaggggttactgaggctgcccactccccagtcctcctggtattatttctctggtggccagagcttatattttcttcttgctcttatttttccttcataaagacccaaccctatgactttaacttcttacagctaccacagcccctaaacccgcaacagttgttacaggttctggtcatgcaagctctaccccaggtggagaaaaggagacttcggctacccagagaagttcagtgcccagctctactgagaagaatgctgtgagtatgaccagcagcgtactctccagccacagccccggttcaggctcctccaccactcagggacaggatgtcactctggccccggccacggaaccagcttcaggttcagctgccacctggggacaggatgtcacctcggtcccagtcaccaggccagccctgggctccaccaccccgccagcccacgatgtcacctcagccccggacaacaagccagccccgggctccaccgcccccccagcccacggtgtcacctcggccccggacaccaggccggccccgggctccaccgcccccccagcccatggtgtcacctcggccccggacaacaggcccgccttgggctccaccgcccctccagtccacaatgtcacctcggcctcaggctctgcatcaggctcagcttctactctggtgcacaacggcacctctgccagggctaccacaaccccagccagcaagagcactccattctcaattcccagccaccactctgatactcctaccacccttgccagccatagcaccaagactgatgccagtagcactcaccatagcacggtacctcctctcacctcctccaatcacagcacttctccccagttgtctactggggtctctttctttttcctgtcttttcacatttcaaacctccagtttaattcctctctggaagatcccagcaccgactactaccaagagctgcagagagacatttctgaaatggtgagtatcggcctttccttccccatgctcccctgaagcagccatcagaactgtccacaccctttgcatcaagcccgagtcctttccctctcaccccagtttttgcagatttataaacaagggggttttctgggcctctccaatattaagttcaggtacagttctgggtgtggacccagtgtggtggttggagggttgggtggtggtcatgaccgtaggagggactggtgcacttaaggttgggggaagagtgctgagccagagctgggacccgtggctgaagtgcccatttccctgtgaccaggccaggatctgtggtggtacaattgactctggccttccgagaaggtaccatcaatgtccacgacgtggagacacagttcaatcagtataaaacggaagcagcctctcgatataacctgacgatctcagacgtcagcggtgaggctacttccctggctgcagccagcaccatgccggggcccctctccttccagtgtctgggtccccgctctttccttagtgctggcagcgggaggggcgcctcctctgggagactgccctgaccactgcttttccttttagtgagtgatgtgccatttcctttctctgcccagtctggggctggggtgccaggctggggcatcgcgctgctggtgctggtctgtgttctggttgcgctggccattgtctatctcattgccttggtgagtgcagtccctggccctgatcagagccccccggtagaaggcactccatggcctgccataacctcctatctccccaggctgtctgtcagtgccgccgaaagaactacgggcagctggacatctttccagcccgggatacctaccatcctatgagcgagtaccccacctaccacacccatgggcgctatgtgccccctagcagtaccgatcgtagcccctatgagaaggtgagattggccccacaggccaggggaagcagagggtttggctgggcaaggattctgaagggggtacttggaaaacccaaagagcttggaagaggtgagaagtggcgtgaagtgagcaggggagggcctggcaaggatgaggggcagaggtcagaggagttttgggggacaggcctgggaggagactatggaagaaaggggcctcaagagggagtggccccactgccagaattcctaaaaagatcattggccgtccacattcatgctggctggcgctggctgaactggtgccaccgtggcagttttgttttgttttgcttttttgcacccagaggcaaaatgggtggagcactatgcccaggggagcccttcccgaggagtccaggggtgagcctctgtgatcccctaatcaatctcctaggaatggagggtagaccgagaaaaggctggcatagggggagtcagtttcccaggtagaagcaagaagaagtgtcagcagaccaggtgagcgtgggtgccagtggggttcttgggagcttcaaggaagcaaggaacgctccctccttcctctcctggtctttctctatgggacctagtaaataattactgcagccacctgaggctggaaaaccactccaggtgggggaggagagagtttagttttcttgctcctattttcctcctcctggagacctccctctctcggctttacaaagacacagatacaccccgccccccaaaacacacacacacacacacacacacacacctccttaggctggaacagcagagaatggagggacaagggggctgattagagccaagaagagggagtgaaggagagcagagggaggagggcagccctgtttacagtcacctggctggtggggtggcaggtgctctctctgaattaaccctttgagagctggccaggactctggactgattaccccagcctggggtggcatccaggggctctaggaggtaccttttgctcctcaccctggatctcttttccttccacccaggtttctgcaggtaatggtggcagcagcctctcttacacaaacccagcagtggcagccacttctgccaacttgtaggggcacgtcgcccgctgagctgagtggccagccagtgccattccactccactcaggttcttcagggccagagcccctgcaccctgtttgggctggtgagctgggagttcaggtgggctgctcacacgtccttcagaggccccaccaatttctcggacacttctcagtgtgtggaagctcatgtgggcccctgaggctcatgcctgggaagtgttgtggtgggggctcccaggaggactggcccagagagccctgagatagcggggatcctgaactggactgaataaaacgtggtctcccactggcgccaacttctgatctttcatctgtgacccgtgggcagcagggcgtcagaatgtgtgtgagggggctgggggaggagacagggaggccaggaggcagtaaggagcgagtttgtttgagaagcaggagatgtgaggaggaggtgacattggggagtaggggtggcctgaggagccacctctggctaaccctggcagcacaagaggaaggaggaaacgaaacccaggcnggctttggagggctagcgtgactgggctccgtgactgagctctgtgtgccagtggctctcccctctcctcgcctggcccacgccctccttgcccctggcatggtgccccccaggtggctctattcttagctgtccgggtgtgaagtaaatccttgggcagtgataacagcccagagtcaacagggttgagataagcagaggctgggtcagatccgggcgctggcaccaggcccagccccctccctgaccccggctnccccaccagcctgctgcccctggggtggnctccacaacaccctgggaatggggaagtggttctggttccctgacccctttggcccaggcacgttgcctgtccctcgaccgcattcccccagggcctgtgctgcaggcctggaagccctgattggggcctgccaccagcagccagagagctatgttccctggcagctgtgatgcgctcaggccgggccaggacacgtgtggcaggaggcttagagcacctgcctggggccttcctctctcaggcaccagatccattggttgctcctgcctagaaccacagcctagcacccctgctccctcccgcctaccacacccagcacagaaactcacaggaatgattgcgctcagggaaggcagagatgtgcctggcatcacagtttattgtttataaaccatgacaataacagctgttgctcagcacaggcctagcagagcccactgcagggggacggcagcgggcaccagaggccttgcctggcccaacccaatgggaacacccagactcagctgggtccccaagggagacttggcacattggcatgggtgtgggacaggtaaagcatgcaagagggagaagagggacataaggggcatgcggctgcggggtgttgggacccaaataaataaagcaggatgacagggtccccttcccctcaccaggaatgcctgacagcgtccagccccaaagcctgcctgtcccaaggctgtagttcagcatcaacagggcagggagcttggcagggcaagggcagagctggagatcatgcccagtnttccaggtgccctccctcccaatcagcctggggggcacaggacagggatggagaaggggctctctccatggcttgggtaacatgccaaaggcaggtcatagggcagactcagtgggggtgggggcctggctaacaagcaatggagagaacgggggccatccagagaggttggcagaagagagcccctgggtcaagagaaaactttggggaagacaagacacgggagaag

SEQ ID NO: 22 - DNA, 4103 bp, homo sapiens
ggagccctgggcgcgggggcggcgtgtcaggtggttgcggagctggtaagaatcatattctaagaactcagccactcaggtatccaccatggtgctgggtcctgaacagaagatgtcagatgacagtgtttctggagatcatggggagtctgccagtcttggtaacatcaaccctgcctatagtaatccctctctttcacagtcccctggggactcagaggagtacttcgccacttactttaatgagaagatctccattcctgaggaggagtactcttgttttagctttcgtaaactctgggctttcaccggaccaggttttcttatgagcattgcctacctggatccaggaaatattgaatccgatttgcagtctggagcagtggctggatttaagttgctctggatccttctgttggccacccttgtggggctgctgctccagcggcttgcagctagactgggagtggttactgggctgcatcttgctgaagtatgtcaccgtcagtatcccaaggtcccacgagtcatcctgtggctgatggtggagttggctatcatcggctcagacatgcaagaagtcattggctcagccattgctatcaatcttctgtctgtaggaagaattcctctgtggggtggcgttctcatcaccattgcagatacttttgtatttctcttcttggacaaatatggcttgcggaagctagaagcattttttggctttctcatcactattatggccctcacatttggatatgagtatgttacagtgaaacccagccagagccaggtactcaagggcatgttcgtaccatcctgttcaggctgtcgcactccacagattgaacaggctgtgggcatcgtgggagctgtcatcatgccacacaacatgtacctgcattctgccttagtcaagtctagacaggtaaaccggaacaataagcaggaagttcgagaagccaataagtactttttcattgaatcctgcattgcactctttgtttccttcatcatcaatgtctttgttgtctcagtctttgctgaagcattttttgggaaaaccaacgagcaggtggttgaagtctgtacaaataccagcagtcctcatgctggcctctttcctaaagataactcgacactggctgtggacatctacaaagggggtgttgtgctgggatgttactttgggcctgctgcactctacatttgggcagtggggatcctggctgcaggacagagctccaccatgacaggaacctattctggccagtttgtcatggagggattcctgaacctaaagtggtcacgctttgcccgagtggttctgactcgctctattgccatcatccccactctgcttgttgctgtcttccaagatgtagagcatctaacagggatgaatgactttctgaatgttctacagagcttacagcttccctttgctctcatacccatcctcacatttacgagcttgcggccagtaatgagtgactttgccaatggactaggctggcggattgcaggaggaatcttggtccttatcatctgttccatcaatatgtactttgtagtggtttatgtccgggacctagggcatgtggcattatatgtggtggctgctgtggtcagcgtggcttatctgggctttgtgttctacttgggttggcaatgtttgattgcactgggcatgtccttcctggactgtgggcatacggtaagcatctctaaaggcctgctgacagaagaagccacccgtggctacgttaaataacactggattagtctgtcttctgcaggtagccatcagagccagtgtgtttctatggtttactgtgtgaacatagccaaaagtatgtgccgttgcacagactgtgtttatgactcaaccgttggttggaaaagactttgtttcatgtgtatttgaaagatggaattattttttccttcctgacctaaccttagaactggattagggtgggatctttgaaaagctgacatttgctgctatcattccaacactaaattcttaagtagttgcccaagggccagctcagtttatccttcggagagacaaggatatgcatgattcttaaccaggctatatgttaaaaaaaaattggaaaatgcaatacattttttattatacaaactacagaatgagtatgcaagttttatttatcaaaatgtaatggatttttaaaggctgagaaattttccttatacctaccttttcagttattttaattataccaaattatcaactagaatagcttcatccatatgaaatataaaatgaagagacacctagctctatcaggcttaggattctttgaacttatttccactttaatttctcagtggaagttaagaggggtgagaaaacaaagaaggggaaaaactgacaactaacaaaaccagcaccacatcgctaggtggtgcttactaattaccttctcaggattttcctcagattgaaaagcttatgaggatttcttgggagtcttaataacctgcctgttagtacagagctttcctgatgatatttactcttgagcacatgtggttgtaaaaccttaactttctttctccaggagggtggtgatagaaacagatggtagtatttatgaactgatgttctcgtgaaatgttgagggtggggagaaaagactttaagggaggagagccatctattttgttcctaaagccacctctcagcagaatcgtcatgtttttctgatgcaccgctctgcttcatgcccaagatgacttgcgaggcaatctcaggagctgtggacttaaccgttgcaaagcacactgtctttctcagcgttctctgcaagtcagtaggtgttagtatggttgcaaagttcactgtctcagcaaagttgaactgggctacctctctacagctgtttcctcagagggaaaaatcttgagaccatggtggagctctggagtcagaggaaatgggtgtcttcagcacaaagctgctgcttttacttcagccacttctgacatttttacataccgagcctgagattgtgtgattatctcaaatcaaatcactttgatggagataaataatcaaaactgttttatagtcattgatttggtgagaacagtaatggaaaatggtgttgaaggacttctcatttttggagctttccttccagagtcctggctgattggtgttcgctgttcatctgagcccccaaaagcattattactgatacttgcacacagtcaaaagcgcagactggatggatggtcttttataaggcatttaagggtacactactgtgtttcactgaccatacatttttcttagcccctcaagtaatatagcacagagttatgaatgacaattcccctaaccattcctcttcatatctgcctcttccccttaccatcgtaattctccaaactggtcataaaggcactctgtgaagatattggggactgacatcttaagctctcacctggctgcagtaggaaaggccaaactgacgacaaaaaaaaaattctttataaagatgatatggtaacatgtatctttgccctgggtctgggtgggtccagtcagtctcagatttacaagcatttaggagcctaggtaaaagctgctagtattcttttaaaagttatatttatgacttgcaatgatagaaaactccttccaattaaatggcattttataatattatgtgtgtacttcacagtgttaaaaataccctcatacgttattgcatttgatcttcacagaaagtgcattttaaccagtactctgggtgcaataaataatatgtagaaatttaagtcctccaattccagcatatccagtgagttttgacagtgtgtttatgtggaatgtttaaggatatacaattgtactttatataaattggttcttgttcttcttaaatgtgacatgaaataattgtgctgctacattatactggaaattaacaggggaaaagggaagagctcttggctcccttgaggttctgctagtggtgttaggagtggttacaactgagcttttagtaaccatttaaccgtatgtaaacttggtttctaattaaaaaaaaatttctttttcc

SEQ ID NO: 23 - DNA, 5645 bp, homo sapiens
cgcccgcgcgctgcagccccatctcctagcggcagcccaggcgcggagggagcgagtccgccccgaggtaggtccaggacgggcgcacagcagcagccgaggctggccgggagagggaggaagaggatggcagggccacgccccagcccatgggccaggctgctcctggcagccttgatcagcgtcagcctctctgggaccttggcaaaccgctgcaagaaggccccagtgaagagctgcacggagtgtgtccgtgtggataaggactgcgcctactgcacagacgagatgttcagggaccggcgctgcaacacccaggcggagctgctggccgcgggctgccagcgggagagcatcgtggtcatggagagcagcttccaaatcacagaggagacccagattgacaccaccctgcggcgcagccagatgtccccccaaggcctgcgggtccgtctgcggcccggtgaggagcggcattttgagctggaggtgtttgagccactggagagccccgtggacctgtacatcctcatggacttctccaactccatgtccgatgatctggacaacctcaagaagatggggcagaacctggctcgggtcctgagccagctcaccagcgactacactattggatttggcaagtttgtggacaaagtcagcgtcccgcagacggacatgaggcctgagaagctgaaggagccctggcccaacagtgacccccccttctccttcaagaacgtcatcagcctgacagaagatgtggatgagttccggaataaactgcagggagagcggatctcaggcaacctggatgctcctgagggcggcttcgatgccatcctgcagacagctgtgtgcacgagggacattggctggcgcccggacagcacccacctgctggtcttctccaccgagtcagccttccactatgaggctgatggcgccaacgtgctggctggcatcatgagccgcaacgatgaacggtgccacctggacaccacgggcacctacacccagtacaggacacaggactacccgtcggtgcccaccctggtgcgcctgctcgccaagcacaacatcatccccatctttgctgtcaccaactactcctatagctactacgagaagcttcacacctatttccctgtctcctcactgggggtgctgcaggaggactcgtccaacatcgtggagctgctggaggaggccttcaatcggatccgctccaacctggacatccgggccctagacagcccccgaggccttcggacagaggtcacctccaagatgttccagaagacgaggactgggtcctttcacatccggcggggggaagtgggtatataccaggtgcagctgcgggcccttgagcacgtggatgggacgcacgtgtgccagctgccggaggaccagaagggcaacatccatctgaaaccttccttctccgacggcctcaagatggacgcgggcatcatctgtgatgtgtgcacctgcgagctgcaaaaagaggtgcggtcagctcgctgcagcttcaacggagacttcgtgtgcggacagtgtgtgtgcagcgagggctggagtggccagacctgcaactgctccaccggctctctgagtgacattcagccctgcctgcgggagggcgaggacaagccgtgctccggccgtggggagtgccagtgcgggcactgtgtgtgctacggcgaaggccgctacgagggtcagttctgcgagtatgacaacttccagtgtccccgcacttccgggttcctctgcaatgaccgaggacgctgctccatgggccagtgtgtgtgtgagcctggttggacaggcccaagctgtgactgtcccctcagcaatgccacctgcatcgacagcaatgggggcatctgtaatggacgtggccactgtgagtgtggccgctgccactgccaccagcagtcgctctacacggacaccatctgcgagatcaactactcggcgatccacccgggcctctgcgaggacctacgctcctgcgtgcagtgccaggcgtggggcaccggcgagaagaaggggcgcacgtgtgaggaatgcaacttcaaggtcaagatggtggacgagcttaagagagccgaggaggtggtggtgcgctgctccttccgggacgaggatgacgactgcacctacagctacaccatggaaggtgacggcgcccctgggcccaacagcactgtcctggtgcacaagaagaaggactgccctccgggctccttctggtggctcatccccctgctcctcctcctcctgccgctcctggccctgctactgctgctatgctggaagtactgtgcctgctgcaaggcctgcctggcacttctcccgtgctgcaaccgaggtcacatggtgggctttaaggaagaccactacatgctgcgggagaacctgatggcctctgaccacttggacacgcccatgctgcgcagcgggaacctcaagggccgtgacgtggtccgctggaaggtcaccaacaacatgcagcggcctggctttgccactcatgccgccagcatcaaccccacagagctggtgccctacgggctgtccttgcgcctggcccgcctttgcaccgagaacctgctgaagcctgacactcgggagtgcgcccagctgcgccaggaggtggaggagaacctgaacgaggtctacaggcagatctccggtgtacacaagctccagcagaccaagttccggcagcagcccaatgccgggaaaaagcaagaccacaccattgtggacacagtgctgatggcgccccgctcggccaagccggccctgctgaagcttacagagaagcaggtggaacagagggccttccacgacctcaaggtggcccccggctactacaccctcactgcagaccaggacgcccggggcatggtggagttccaggagggcgtggagctggtggacgtacgggtgcccctctttatccggcctgaggatgacgacgagaagcagctgctggtggaggccatcgacgtgcccgcaggcactgccaccctcggccgccgcctggtaaacatcaccatcatcaaggagcaagccagagacgtggtgtcctttgagcagcctgagttctcggtcagccgcggggaccaggtggcccgcatccctgtcatccggcgtgtcctggacggcgggaagtcccaggtctcctaccgcacacaggatggcaccgcgcagggcaaccgggactacatccccgtggagggtgagctgctgttccagcctggggaggcctggaaagagctgcaggtgaagctcctggagctgcaagaagttgactccctcctgcggggccgccaggtccgccgtttccacgtccagctcagcaaccctaagtttggggcccacctgggccagccccactccaccaccatcatcatcagggacccagatgaactggaccggagcttcacgagtcagatgttgtcatcacagccaccccctcacggcgacctgggcgccccgcagaaccccaatgctaaggccgctgggtccaggaagatccatttcaactggctgcccccttctggcaagccaatggggtacagggtaaagtactggattcagggtgactccgaatccgaagcccacctgctcgacagcaaggtgccctcagtggagctcaccaacctgtacccgtattgcgactatgagatgaaggtgtgcgcctacggggctcagggcgagggaccctacagctccctggtgtcctgccgcacccaccaggaagtgcccagcgagccagggcgtctggccttcaatgtcgtctcctccacggtgacccagctgagctgggctgagccggctgagaccaacggtgagatcacagcctacgaggtctgctatggcctggtcaacgatgacaaccgacctattgggcccatgaagaaagtgctggttgacaaccctaagaaccggatgctgcttattgagaaccttcgggagtcccagccctaccgctacacggtgaaggcgcgcaacggggccggctgggggcctgagcgggaggccatcatcaacctggccacccagcccaagaggcccatgtccatccccatcatccctgacatccctatcgtggacgcccagagcggggaggactacgacagcttccttatgtacagcgatgacgttctacgctctccatcgggcagccagaggcccagcgtctccgatgacactgagcacctggtgaatggccggatggactttgccttcccgggcagcaccaactccctgcacaggatgaccacgaccagtgctgctgcctatggcacccacctgagcccacacgtgccccaccgcgtgctaagcacatcctccaccctcacacgggactacaactcactgacccgctcagaacactcacactcgaccacactgccgagggactactccaccctcacctccgtctcctcccacgactctcgcctgactgctggtgtgcccgacacgcccacccgcctggtgttctctgccctggggcccacatctctcagagtgagctggcaggagccgcggtgcgagcggccgctgcagggctacagtgtggagtaccagctgctgaacggcggtgagctgcatcggctcaacatccccaaccctgcccagacctcggtggtggtggaagacctcctgcccaaccactcctacgtgttccgcgtgcgggcccagagccaggaaggctggggccgagagcgtgagggtgtcatcaccattgaatcccaggtgcacccgcagagcccactgtgtcccctgccaggctccgccttcactttgagcactcccagtgccccaggcccgctggtgttcactgccctgagcccagactcgctgcagctgagctgggagcggccacggaggcccaatggggatatcgtcggctacctggtgacctgtgagatggcccaaggaggagggccagccaccgcattccgggtggatggagacagccccgagagccggctgaccgtgccgggcctcagcgagaacgtgccctacaagttcaaggtgcaggccaggaccactgagggcttcgggccagagcgcgagggcatcatcaccatagagtcccaggatggaggacccttcccgcagctgggcagccgtgccgggctcttccagcacccgctgcaaagcgagtacagcagcatcaccaccacccacaccagcgccaccgagcccttcctagtggatgggccgaccctgggggcccagcacctggaggcaggcggctccctcacccggcatgtgacccaggagtttgtgagccggacactgaccaccagcggaacccttagcacccacatggaccaacagttcttccaaacttgaccgcaccctgccccacccccgccatgtcccactaggcgtcctcccgactcctctcccggagcctcctcagctactccatccttgcacccctgggggcccagcccacccgcatgcacagagcaggggctaggtgtctcctgggaggcatgaagggggcaaggtccgtcctctgtgggcccaaacctatttgtaaccaaagagctgggagcagcacaaggacccagcctttgttctgcacttaataaatggttttgctactg

SEQ ID NO: 24 - DNA, 1953 bp, homo sapiens
ctcgaggcgcggagctgggagtggcttcgccatggctgtgagaagggactccgtgtggaagtactgctggggtgttttgatggttttatgcagaactgcgatttccaaatcgatagttttagagcctatctattggaattcctcgaactccaaatttctacctggacaaggactggtactatacccacagataggagacaaattggatattatttgccccaaagtggactctaaaactgttggccagtatgaatattataaagtttatatggttgataaagaccaagcagacagatgcactattaagaaggaaaatacccctctcctcaactgtgccaaaccagaccaagatatcaaattcaccatcaagtttcaagaattcagccctaacctctggggtctagaatttcagaagaacaaagattattacattatatctacatcaaatgggtctttggagggcctggataaccaggagggaggggtgtgccagacaagagccatgaagatcctcatgaaagttggacaagatgcaagttctgctggatcaaccaggaataaagatccaacaagacgtccagaactagaagctggtacaaatggaagaagttcgacaacaagtccctttgtaaaaccaaatccaggttctagcacagacggcaacagcgccggacattcggggaacaacatcctcggttccgaagtggccttatttgcagggattgcttcaggatgcatcatcttcatcgtcatcatcatcacgctggtggtcctcttgctgaagtaccggaggagacacaggaagcactcgccgcagcacacgaccacgctgtcgctcagcacactggccacacccaagcgcagcggcaacaacaacggctcagagcccagtgacattatcatcccgctaaggactgcggacagcgtcttctgccctcactacgagaaggtcagcggggactacgggcacccggtgtacatcgtccaggagatgcccccgcagagcccggcgaacatttactacaaggtctgagagggaccctggtggtacctgtgctttcccagaggacacctaatgtcccgatgcctcccttgagggtttgagagcccgcgtgctggagaattgactgaagcacagcaccgggggagagggacactcctcctcggaagagcccgtcgcgctggacagcttacctagtcttgtagcattcggccttggtgaacacacacgctccctggaagctggaagactgtgcagaagacgcccattcggactgctgtgccgcgtcccacgtctcctcctcgaagccatgtgctgcggtcactcaggcctctgcagaagccaagggaagacagtggtttgtggacgagagggctgtgagcatcctggcaggtgccccaggatgccacgcctggaagggccggcttctgcctggggtgcatttcccccgcagtgcataccggacttgtcacacggacctcgggctagttaaggtgtgcaaagatctctagagtttagtccttactgtctcactcgttctgttacccagggctctgcagcacctcacctgagacctccactccacatctgcatcactcatggaacactcatgtctggagtcccctcctccagccgctggcaacaacagcttcagtccatgggtaatccgttcatagaaattgtgtttgctaacaaggtgccctttagccagatgctaggctgtctgcgaagaaggctaggagttcatagaagggagtggggctggggaaagggctggctgcaattgcagctcactgctgctgcctctgaaacagaaagttggaaaggaaaaaagaaaaaagcaattaggtagcacagcactttggttttgctgagatcgaagaggccagtaggagacacgacagcacacacagtggattccagtgcatggggaggcggtcgacgagctcgag

SEQ ID NO: 25 - DNA, 2036 bp, homo sapiens
gggactccgcgtctcgctctctgtgttccaatcgcccggtgcggtggtgcagggtctcgggctagtcatggcgtccccgtctcggagactgcagactaaaccagtcattacttgtttcaagagcgttctgctaatctacacttttattttctggatcactggcgttatccttcttgcagttggcatttggggcaaggtgagcctggagaattacttttctcttttaaatgagaaggccaccaatgtccccttcgtgctaattgctactggtaccgtcattattcttttgggcacctttggttgttttgctacctgccgagcttctgcatggatgctaaaactgtatgcaatgtttctgactctcgtttttttggtcgaactggtcgctgccatcgtaggatttgttttcagacatgagattaagaacagctttaagaataattatgagaaggctttgaagcagtataactctacaggagattatagaagccatgcagtagacaagatccaaaatacgttgcattgttgtggtgtcaccgattatagagattggacagatactaattattactcagaaaaaggatttcctaagagttgctgtaaacttgaagattgtactccacagagagatgcagacaaagtaaacaatgaaggttgttttataaaggtgatgaccattatagagtcagaaatgggagtcgttgcaggaatttcctttggagttgcttgcttccaactgattggaatctttctcgcctactgcctctctcgtgccataacaaataaccagtatgagatagtgtaacccaatgtatctgtgggcctattcctctctacctttaaggacatttaggtcccccctgtgaattagaaagttgcttggctggagaactgacagcactacttactgatagaccaaaaaactacaccagtaggttgattcaatcaagatgtatgtagacctaaaactacaccaataggctgattcaatcaagatccgtgctcgcagtgggctgattcaatcaagatgtatgtttgctatgttctaagtccaccttctatcccattcatgttagatcgttgaaacctggtctccctctgaaacactggaagagctagtaaattgtaaatgaagtaatactgtgttcctcttgactgttatttttcttagtagggggcctttggaaggcactgtgaatttgctattttgatgtagtgttaccaagatggaaaattgattcctctgactttgctattgatgtagtgtgatagaaaattcacccctctgaactggctccttcccagtcaaggttatctggtttgattgtataatttgcaccaagaagttaaaatgttttatgactctctgttctgctgacaggcagagagtcacattgtgtaatttaatttcagtcagtcaatagatggcatccctcatcagggttgccagatggtgataacagtgtaaggccttgggtctaaggcatccacgactggaagggactactgatgttctgtgatacatcaggtttcagcacacaacttacatttctttgcctccaaattgaggcatttattatgatgttcatactttccctcttgtttgaaagtttctaattattaaatggtgtcggaattgttgtattttccttaggaattcagtggaacttatcttcattaaatttagctggtaccaggttgatatgacttgtcaatattatggtcaactttaagtcttagttttcgtttgtgcctttgattaataagtataactcttatacaataaatactgctttcctctaaaaagatcgtgtttaaattaacttgtagaaaatctgctggaatggttgttgttttccactgagaaagctaagccctacatttctattcagagtactgtttttagatgtgaaatataagcctgcggccttaactctgtattaaaaaaaatgtttttgtttaaaaaaaactgttcccataggtgcagcaaaccaccatggcacatgtatacctatgtaacaaacctgcacattttg

SEQ ID NO: 26 - DNA, 2287 bp, homo sapiens
ggacagcacagctgacagccgtgctcagaaagtttctggatcccaggctcatctccacagaggagaacacgcaggcagcagagaccatggggcccatctcagccccttcctgcagatggcgcatcccctggcaggggctcctgctcacagcctcacttttcaccttctggaacccgcccaccactgctcagctcactattgaagctgtgccatccaatgctgcagaggggaaggaggttcttctacttgtccacaatctgccccaggaccctcgtggctacaactggtacaaaggggaaacagtggatgccaaccgtcgaattataggatatgtaatatcaaatcaacagattaccccagggcctgcatacagcaatcgagagacaatataccccaatgcatccctgctgatgcggaacgtcaccagaaatgacacaggatcctacaccctacaagtcataaagctaaatcttatgagtgaagaagtaactggccagttcagcgtacatccggagactcccaagccctccatctccagcaacaactccaaccccgtggaggacaaggatgctgtggccttcacctgtgaacctgagactcagaacacaacctacctgtggtgggtaaatggtcagagtctcccggtcagtcccaggctgcagctgtccaatggcaacaggaccctcactctactcagtgtcacaaggaatgacgtaggaccctatgaatgtgaaatacagaacccagcgagtgcaaacttcagtgacccagtcaccctgaatgtcctctatggcccagatgcccccaccatttccccttcagacacctattaccatgcaggggtaaatctcaacctctcctgccatgcggcctctaatccaccctcacagtattcttggtctgtcaatggcacattccagcaatacacacaaaagctctttatccccaacatcactacaaagaacagcggatcctatgcctgccacaccactaactcagccactggccgcaacaggaccacagtcaggatgatcacagtctctgatgctgtagtacaaggaagttctcctggcctctcagctagagccactgtcagcatcatgattggagtactggccagggtggctctgatatagtagctctggtgtagtttctgcatttcaagaagactggcagacagttgtttttattcttcctcaaagcatttgcaatcagctaccattcaaaattgcttcttcttcaagatttatggaaaatactctgacgagtactcttgaacacaagttcctgataactttaagatcacgccactggactgtctatgaacttgcaaacaggctgatacctttgtgaagttgcccaccaaaacacagaaggaaaaaaacatgaatttcattgaactaaataataatgaggataatgtttttaagattttttttttttttttttttgagatggaatctcgctctgtcgcccaggctggagtgcagtggcacgatctcaactcactgcaacgtccgcctcctgggttcacaccattctcctgcctcagcctcctgagtagctgggactacaggcgcctgccacaacgcccggctaattttttgtatttttagtagagacggggtttcactgtggtctcaatctcctgacttcatggtccgcctgcctcagcctcccaaagttctgggattacaggtgtgagccaccgcgcccagcccgtttttaagattttttatttgaaaaattgccaattctttaagtgttttctttttcagatttatgaatttctttatcttttaagctatctataccttactgcaatttggtaaagcagacttttgtgaacaaaaattataacatttacttttgctccctacctgactgccacagaactgggcaactattcatgagtattcatatgtttatggtaattcagttatttgcacaagttcagtgagaatctgctgtctttataatgggatatagtttaaaacattggttatattaccaaggctttgattgggatgttatatttgagaaaatacagagaatgatagattaacggagtgtctaatctatcgtgtcaaccccaaatttttacgtatgagatcctttagtccacccaatggctgacagtaacagcatctttaacacaactctttgttcaaatgtactatggtctcttttagagtcagactcctagactcacttgttctcactgtctgttttaatttaacccaggcatgcaatgctagataataaaattgctccctattggctgatc

SEQ ID NO: 27 - DNA, 2969 bp, homo sapiens
ctcagggcagagggaggaaggacagcagaccagacagtcacagcagccttgacaaaacgttcctggaactcaagctcttctccacagaggaggacagagcagacagcagagaccatggagtctccctcggcccctccccacagatggtgcatcccctggcagaggctcctgctcacagcctcacttctaaccttctggaacccgcccaccactgccaagctcactattgaatccacgccgttcaatgtcgcagaggggaaggaggtgcttctacttgtccacaatctgccccagcatctttttggctacagctggtacaaaggtgaaagagtggatggcaaccgtcaaattataggatatgtaataggaactcaacaagctaccccagggcccgcatacagtggtcgagagataatataccccaatgcatccctgctgatccagaacatcatccagaatgacacaggattctacaccctacacgtcataaagtcagatcttgtgaatgaagaagcaactggccagttccgggtatacccggagctgcccaagccctccatctccagcaacaactccaaacccgtggaggacaaggatgctgtggccttcacctgtgaacctgagactcaggacgcaacctacctgtggtgggtaaacaatcagagcctcccggtcagtcccaggctgcagctgtccaatggcaacaggaccctcactctattcaatgtcacaagaaatgacacagcaagctacaaatgtgaaacccagaacccagtgagtgccaggcgcagtgattcagtcatcctgaatgtcctctatggcccggatgcccccaccatttcccctctaaacacatcttacagatcaggggaaaatctgaacctctcctgccacgcagcctctaacccacctgcacagtactcttggtttgtcaatgggactttccagcaatccacccaagagctctttatccccaacatcactgtgaataatagtggatcctatacgtgccaagcccataactcagacactggcctcaataggaccacagtcacgacgatcacagtctatgcagagccacccaaacccttcatcaccagcaacaactccaaccccgtggaggatgaggatgctgtagccttaacctgtgaacctgagattcagaacacaacctacctgtggtgggtaaataatcagagcctcccggtcagtcccaggctgcagctgtccaatgacaacaggaccctcactctactcagtgtcacaaggaatgatgtaggaccctatgagtgtggaatccagaacgaattaagtgttgaccacagcgacccagtcatcctgaatgtcctctatggcccagacgaccccaccatttccccctcatacacctattaccgtccaggggtgaacctcagcctctcctgccatgcagcctctaacccacctgcacagtattcttggctgattgatgggaacatccagcaacacacacaagagctctttatctccaacatcactgagaagaacagcggactctatacctgccaggccaataactcagccagtggccacagcaggactacagtcaagacaatcacagtctctgcggagctgcccaagccctccatctccagcaacaactccaaacccgtggaggacaaggatgctgtggccttcacctgtgaacctgaggctcagaacacaacctacctgtggtgggtaaatggtcagagcctcccagtcagtcccaggctgcagctgtccaatggcaacaggaccctcactctattcaatgtcacaagaaatgacgcaagagcctatgtatgtggaatccagaactcagtgagtgcaaaccgcagtgacccagtcaccctggatgtcctctatgggccggacacccccatcatttcccccccagactcgtcttacctttcgggagcgaacctcaacctctcctgccactcggcctctaacccatccccgcagtattcttggcgtatcaatgggataccgcagcaacacacacaagttctctttatcgccaaaatcacgccaaataataacgggacctatgcctgttttgtctctaacttggctactggccgcaataattccatagtcaagagcatcacagtctctgcatctggaacttctcctggtctctcagctggggccactgtcggcatcatgattggagtgctggttggggttgctctgatatagcagccctggtgtagtttcttcatttcaggaagactgacagttgttttgcttcttccttaaagcatttgcaacagctacagtctaaaattgcttctttaccaaggatatttacagaaaagactctgaccagagatcgagaccatcctagccaacatcgtgaaaccccatctctactaaaaatacaaaaatgagctgggcttggtggcgcgcacctgtagtcccagttactcgggaggctgaggcaggagaatcgcttgaacccgggaggtggagattgcagtgagcccagatcgcaccactgcactccagtctggcaacagagcaagactccatctcaaaaagaaaagaaaagaagactctgacctgtactcttgaatacaagtttctgataccactgcactgtctgagaatttccaaaactttaatgaactaactgacagcttcatgaaactgtccaccaagatcaagcagagaaaataattaatttcatgggactaaatgaactaatgaggattgctgattctttaaatgtcttgtttcccagatttcaggaaactttttttcttttaagctatccactcttacagcaatttgataaaatatacttttgtgaacaaaaattgagacatttacattttctccctatgtggtcgctccagacttgggaaactattcatgaatatttatattgtatggtaatatagttattgcacaagttcaataaaaatctgctctttgtataacag

SEQ ID NO: 28 - DNA, 5546 bp, homo sapiens
gtgatgagatataatgcatcctccagtccatgcacgcttcctcttgcaatttgggcatcattcctcagtggaaacctttaaaccctgaaatccaggaaaagaaaataaatacattatcatggacctgagggatttttacctgttggctgctctgattgcctgtttaaggctggattccgcaatagctcaagaacttatttacactattagagaggaattgcctgaaaatgtgcccataggaaacataccaaaggatctgaacatttctcacatcaatgctgccacagggaccagcgccagccttgtctacagactggtttctaaagctggggatgcccctttggtgaaagtatccagcagcactggggaaattttcacaacctccaacagaatagacagagaaaaactctgtgctggcgcctcatatgctgaggagaatgagtgtttctttgaacttgaggtggtgatcctccccaatgatttcttcaggctgatcaaaataaaaataattgtcaaggataccaatgataatgcccccatgtttccatctcctgtcatcaatatttccattccagaaaacactttgatcaacagccgctttccaattccatcagcaacagatcctgacacaggcttcaatggtgtacagcattatgaattgttaaatgggcagagtgtttttggactggatatcgtggaaactccagagggagagaagtggccacaactgattgttcagcaaaacttggatagagaacagaaagatacctatgtgatgaaaatcaaagtagaggatggaggcactccacagaaatccagtacggccatactgcaggtcacagtaagtgatgtaaatgacaacaggccagtgtttaaagagggtcaagtggaggtgcatattccagagaatgctcccgtaggtacctctgtaattcagctccatgccactgatgcagatataggcagtaatgctgaaatccggtacatttttggtgcccaggtcgcccctgcaaccaaaagactctttgctttaaataatactactgggctgattacagttcagaggtccttagatagagaggagacagccattcacaaagtgacagtgctggctagtgacggcagctccactcctgctcgagcaacggttaccatcaatgtcaccgatgtaaatgataaccctcctaatatagacctcaggtacattataagtcccatcaatggcaccgtgtatttatctgagaaagatcctgtcaatacaaagattgccctaattacagtttcagataaggacacagatgtgaatggcaaagtgatctgttttattgaaagagaggtcccatttcatttgaaggcggtatatgacaaccaatatttgttagagacctcttctttgttggactatgagggcaccaaagaattcagctttaaaattgttgcctctgattctgggaagcccagtttaaatcagactgccctggtaagggttaagcttgaggatgaaaatgacaacccaccaattttcaaccagcctgtaattgagctgtcagtttctgaaaacaaccgacgtgggttatacttaacaactattagtgccacagatgaagacagtgggaaaaatgcagacattgtttatcagcttggaccgaatgcctccttctttgatctggaccgaaaaacaggagttttgacagcctccagagtatttgacagagaagaacaagaacgattcatttttacagtaactgccagggataatgggacccctcccctccaaagccaagcggctgtgattgttactgttctggatgagaatgacaatagccccaagtttactcataatcattttcaattttttgtgtctgagaatctgccaaagtatagtactgtgggggtaatcacagtgacagatgcagatgctggagagaataaagctgtgactctttccattctaaatgacaatgataattttgtgttggatccctattctggagtcataaagtcaaatgtctcatttgatagagagcagcagagttcctacacttttgatgtcaaagccactgatggaggacaaccacctcgttcctctactgcaaaagtaactatcaacgtcatggatgtcaatgacaacagcccagttgtcatttctccaccgtctaatacttcctttaagttggtgcccctctcagccattcctggctccgtggtagcagaagtttttgcagtggatgttgacactggaatgaacgctgaactaaagtatactatagtgagtggaaacaataaaggcttattccggattgatccagtaacaggtaacattactctggaagaaaaaccagcacctactgatgtgggattgcatcgtttggtggtcaacataagtgacctggggtaccctaagtctttgcacacgcttgtgcttgtattcctttatgttaacgacactgctggaaatgcctcctatatctatgacttgatccgcaggactatggagaccccgttggacaggaacataggggatagtagccaaccctatcaaaatgaggactatctaaccatcatgattgccatcatcgccggtgccatggtggtcattgttgtgatcttcgtcaccgttctggtgcgctgtcgccatgcatcaaggttcaaagcagctcagaggagcaagcaaggtgccgaatggatgtccccaaaccaggagaacaagcaaaacaagaaaaagaaaagaaagaaaaggaagtctcccaaaagctctcttttgaactttgttactatcgaagagtccaaacccgatgatgcagttcatgaacctatcaatgggacaataagcctgccggctgaactggaggagcaaagtataggaagatttgactggggcccggcacctccaacaacattcaagcctaacagtcctgacctggccaagcactacaaatctgcttctccacagcctgcttttcatctcaaaccagacactccagtttccgtgaaaaagcaccacgtgattcaggaactccctttggacaacacctttgttgggggttgtgacaccctttctaaacgctcttccactagttcagatcacttcagtgcctcagagtgcagttcccaaggaggcttcaagacaaagggccccttacacaccagacagtcgcagcgccgtgttacgtttcatctccctgatggctcccaggaaagctgcagtgacagtggtctaggagaccatgagccggtgggtagtggaaccctgatctcacaccctcttcctctggttcagccacaggacgaattctatgaccaggcctctccggacaagaggactgaagcagatggcaactctgatcccaactctgatgggcctttgggtccccgaggattagctgaagctacagagatgtgcactcaagagtgcttggttttgggtcactctgataattgctggatgcctcctggcttgggtccatatcaacaccccaaatctcctctctcaacctttgcaccccagaaagaatgggtgaagaaggacaagcttgtgaatgggcacaccctgaccagagcctggaaagaagacagcaacaggaaccagttcaatgaccgtaagcagtatggctccaatgaaggccatttcaacaatggcagccacatgacagacattcctctggcaaatctgaagtcttataagcaagcaggaggtgctactgagagtcctaaggagcaccaactctaagaaaaggctatatgggacctaataactttaaatagacatgctaataccgtgtgcgtcagagctttatgtattcaatagatctctacaactatgccccttctagcagggatacctataactttgtgttagcaccatggagaatacaatgtttttgcaacatatgagagaagatagttctagccatgcaattttgtttactagaattgattacactctccagagatctctccattgtgcaaattttttttattattgcattttattttgaccctggactgctgctatgaacaatagaatatgcatttggaaagtaagaaagtttcatggattagagtgactgaaaaacatatccagttagaaaattgtgcttttttttttttttttttttgtcattgatttgtgctgggactgctatacttgacattatactgcaaacaaaacttaaagagataagcattaaacctattgtgctgttaacaacgttagtggacacttgtaagtcaatcagtgttaaagtatttgtaaatagaagcaagctattattaacaacttttgtgtacttataatgttcacctaaaaatgttgtagcataattctgtgttttatggttgcttctgtccttctttttatttacctctttgttgttatttttgttgcttctttcagtgaggtgtttctgtgttagtagtctgtcttgacacacattgttcaaacaatctcaagcacttgtgtttaaaaaaggttctgaaatcttgcttctcatatgatagcttatgatgccggaattctgtaaacaataaagatgaaagaaaaaatgaaaactttatacaaaaaaggacttctgcaaaagcttggaaattcagaacctattttttatcatcttattttcaaagtaggcaaaagcaaaatcacttaattagcaccattaagtgagagagtaatggaaaacggttatccaccaaaagtgatataatatcctgtacttgtcactcatgtaaaactaatgtatcaaaattagcatatatggaagaaaaatcactattcaaaaatagtttcaattgggcaaatgtgtgtctacaactttgttgaaatggcacagtctgtgttgatcctcatatacaataatgttgttgtaacacaagtgttattagaccatagccacaaaatatttaatgtgttgtgccttcatgatgtaacagaacattctccaggtagggtagttgggggaaataaagggataaatctctaattattgctgtttaactgtttgttatcatagttggtcaatgcctggcaggtaccagcatattgtcacttaggtcaaaccaataaagtggcaactaatgttaataagatttcagttgcacgtgcaaacaaatccaaattcgaacattcttagaaggtttttgttaaggcatgacagatgatttaaacaaataaatagcatgcaacaaaatgtctttattgaaagaagtggaagttatcttaatgccacggttcaccatcaatttaaaagtaaaaaaaccaaaaaaaaaacaaaaaatttaaaaaaaaggtttgctaatctgatagttaatttgttcttaccaaaaaataaaattactttgtaaatagcagttcacatttttccacagtataatggaaaataatgggtaggggtgcattgcttattgaagtacatttttgtcggtttgtgaggggtgtttgatgactttgacagaataaatatctaaacaattatccttgttactgctttgccagttctacgttatttacaattattcagctcttgcaataaatgttctgaattaccaaa

SEQ ID NO: 29 - DNA, 1982 bp, homo sapiens
ggcgagaggcgggctgaggcggcccagcggcggcaggtgaggcggaaccaaccctcctggccatgggaggggccgtggtggacgagggccccacaggcgtcaaggcccctgacggcggctggggctgggccgtgctcttcggctgtttcgtcatcactggcttctcctacgccttccccaaggccgtcagtgtcttcttcaaggagctcatacaggagtttgggatcggctacagcgacacagcctggatctcctccatcctgctggccatgctctacgggacaggtccgctctgcagtgtgtgcgtgaaccgctttggctgccggcccgtcatgcttgtggggggtctctttgcgtcgctgggcatggtggctgcgtccttttgccggagcatcatccaggtctacctcaccactggggtcatcacggggttgggtttggcactcaacttccagccctcgctcatcatgctgaaccgctacttcagcaagcggcgccccatggccaacgggctggcggcagcaggtagccctgtcttcctgtgtgccctgagcccgctggggcagctgctgcaggaccgctacggctggcggggcggcttcctcatcctgggcggcctgctgctcaactgctgcgtgtgtgccgcactcatgaggcccctggtggtcacggcccagccgggctcggggccgccgcgaccctcccggcgcctgctagacctgagcgtcttccgggaccgcggctttgtgctttacgccgtggccgcctcggtcatggtgctggggctcttcgtcccgcccgtgttcgtggtgagctacgccaaggacctgggcgtgcccgacaccaaggccgccttcctgctcaccatcctgggcttcattgacatcttcgcgcggccggccgcgggcttcgtggcggggcttgggaaggtgcggccctactccgtctacctcttcagcttctccatgttcttcaacggcctcgcggacctggcgggctctacggcgggcgactacggcggcctcgtggtcttctgcatcttctttggcatctcctacggcatggtgggggccctgcagttcgaggtgctcatggccatcgtgggcacccacaagttctccagtgccattggcctggtgctgctgatggaggcggtggccgtgctcgtcgggcccccttcgggaggcaaactcctggatgcgacccacgtctacatgtacgtgttcatcctggcgggggccgaggtgctcacctcctccctgattttgctgctgggcaacttcttctgcattaggaagaagcccaaagagccacagcctgaggtggcggccgcggaggaggagaagctccacaagcctcctgcagactcgggggtggacttgcgggaggtggagcatttcctgaaggctgagcctgagaaaaacggggaggtggttcacaccccggaaacaagtgtctgagtggctgggcggggccggcaggcacagggaggaggtacagaagccggcaacgcttgctatttattttacaaactggactggctcaggcagggccacggctgggctccagctgccggcccagcggatcgtcgcccgatcagtgttttgagggggaaggtggcggggtgggaaccgtgtcattccagagtggatctgcggtgaagccaagccgcaaggttacaaggcatcctcaccaggggccccgcctgctgctcccaggtggcctgcggccactgctatgctcaaggacctggaaacccatgcttcgagacaacgtgactttaatgggagggtgggtgggccgcagacaggctggcagggcaggtgctgcgtggggccctctccagcccgtcctaccctgggctcacatggggcctgtgcccacccctcttgagtgtcttggggacagctctttccacccctggaagatggaaataaacctgcgtgtgggtggagtgttctcgtgccgaattcaaaaagctt

SEQ ID NO: 30 - DNA, 1422 bp, homo sapiens
gaccagactcgtctcaggccagttgcagccttctcagccaaacgccgaccaaggaaaactcactaccatgagaattgcagtgatttgcttttgcctcctaggcatcacctgtgccataccagttaaacaggctgattctggaagttctgaggaaaagcagctttacaacaaatacccagatgctgtggccacatggctaaaccctgacccatctcagaagcagaatctcctagccccacagaatgctgtgtcctctgaagaaaccaatgactttaaacaagagacccttccaagtaagtccaacgaaagccatgaccacatggatgatatggatgatgaagatgatgatgaccatgtggacagccaggactccattgactcgaacgactctgatgatgtagatgacactgatgattctcaccagtctgatgagtctcaccattctgatgaatctgatgaactggtcactgattttcccacggacctgccagcaaccgaagttttcactccagttgtccccacagtagacacatatgatggccgaggtgatagtgtggtttatggactgaggtcaaaatctaagaagtttcgcagacctgacatccagtaccctgatgctacagacgaggacatcacctcacacatggaaagcgaggagttgaatggtgcatacaaggccatccccgttgcccaggacctgaacgcgccttctgattgggacagccgtgggaaggacagttatgaaacgagtcagctggatgaccagagtgctgaaacccacagccacaagcagtccagattatataagcggaaagccaatgatgagagcaatgagcattccgatgtgattgatagtcaggaactttccaaagtcagccgtgaattccacagccatgaatttcacagccatgaagatatgctggttgtagaccccaaaagtaaggaagaagataaacacctgaaatttcgtatttctcatgaattagatagtgcatcttctgaggtcaattaaaaggagaaaaaatacaatttctcactttgcatttagtcaaaagaaaaaatgctttatagcaaaatgaaagagaacatgaaatgcttctttctcagtttattggttgaatgtgtatctatttgagtctggaaataactaatgtgtttgataattagtttagtttgtggcttcatggaaactccctgtaaactaaaagcttcagggttatgtctatgttcattctatagaagaaatgcaaactatcactgtattttaatatttgttattctctcatgaatagaaatttatgtagaagcaaacaaaatacttttacccacttaaaaagagaatataacattttatgtcactataatcttttgttttttaagttagtgtatattttgttgtgattatctttttgtggtgtgaat

SEQ ID NO: 31 - DNA, 2969 bp, homo sapiens; identical to SEQ ID NO: 27

SEQ ID NO: 32 - DNA, 2821 bp, homo sapiens
ggcttcctcgagcgtcccaccggctggaagttgtagacgcggccctggacgtgggtgcgcgccaacaccgggcggcgcgtgctgtagatggagacgcgcgggtctaggctcaccggcggccagggccgcgtctacaacttcctcgagcgtcccaccggctggaaatgcttcgtttaccacttcgccgtcttcctcatcgtcctggtctgcctcatcttcagcgtgctgtccaccatcgagcagtatgccgccctggccacggggactctcttctggatggagatcgtgctggtggtgttcttcgggacggagtacgtggtccgcctctggtccgccggctgccgcagcaagtacgtgggcctctgggggcggctgcgctttgcccggaagcccatttccatcatcgacctcatcgtggtcgtggcctccatggtggtcctctgcgtgggctccaaggggcaggtgtttgccacgtcggccatcaggggcatccgcttcctgcagatcctgaggatgctacacgtcgaccgccagggaggcacctggaggctcctgggctccgtggtcttcatccaccgccaggagctgataaccaccctgtacatcggcttcctgggcctcatcttctcctcgtactttgtgtacctggctgagaaggacgcggtgaacgagtcaggccgcgtggagttcggcagctacgcagatgcgctgtggtggggggtggtcacagtcaccaccatcggctatggggacaaggtgccccagacgtgggtcgggaagaccatcgcctcctgcttctctgtctttgccatctccttctttgcgctcccagcggggattcttggctcggggtttgccctgaaggtgcagcagaagcagaggcagaagcacttcaaccggcagatcccggcggcagcctcactcattcagaccgcatggaggtgctatgctgccgagaaccccgactcctccacctggaagatctacatccggaaggccccccggagccacactctgctgtcacccagccccaaacccaagaagtctgtggtggtaaagaaaaaaaagttcaagctggacaaagacaatggggtgactcctggagagaagatgctcacagtcccccatatcacgtgcgaccccccagaagagcggcggctggaccacttctctgtcgacggctatgacagttctgtaaggaagagcccaacactgctggaagtgagcatgccccatttcatgagaaccaacagcttcgccgaggacctggacctggaaggggagactctgctgacacccatcacccacatctcacagctgcgggaacaccatcgggccaccattaaggtcattcgacgcatgcagtactttgtggccaagaagaaattccagcaagcgcggaagccttacgatgtgcgggacgtcattgagcagtactcgcagggccacctcaacctcatggtgcgcatcaaggagctgcagaggaggctggaccagtccattgggaagccctcactgttcatctccgtctcagaaaagagcaaggatcgcggcagcaacacgatcggcgcccgcctgaaccgagtagaagacaaggtgacgcagctggaccagaggctggcactcatcaccgacatgcttcaccagctgctctccttgcacggtggcagcacccccggcagcggcggcccccccagagagggcggggcccacatcacccagccctgcggcagtggcggctccgtcgaccctgagctcttcctgcccagcaacaccctgcccacctacgagcagctgaccgtgcccaggaggggccccgatgaggggtcctgaggaggggatggggctgggggatgggcctgagtgagaggggaggccaagagtggccccacctggccctctctgaaggaggccacctcctaaaaggcccagagagaagagccccactctcagaggccccaataccccatggaccatgctgtctggcacagcctgcacttgggggctcagcaaggccacctcttcctggccggtgtgggggccccgtctcaggtctgagttgttaccccaagcgccctggcccccacatggtgatgttgacatcactggcatggtggttgggacccagtggcagggcacagggcctggcccatgtatggccaggaagtagcacaggctgagtgcaggcccaccctgcttggcccagggggcttcctgaggggagacagagcaacccctggaccccagcctcaaatccaggaccctgccaggcacaggcagggcaggaccagcccacgctgactacagggccaccggcaataaaagcccaggagcccatttggagggcctgggcctggctccctcactctcaggaaatgctgacccatgggcaggagactgtggagactgctcctgagcccccagcttccagcaggagggacagtctcaccatttccccagggcacgtggttgagtggggggaacgcccacttccctgggttagactgccagctcttcctagctggagaggagccctgcctctccgcccctgagcccactgtgcgtggggctcccgcctccaacccctcgcccagtcccagcagccagccaaacacacagaaggggactgccacctccccttgccagctgctgagccgcagagaagtgacggttcctacacaggacaggggttccttctgggcattacatcgcatagaaatcaataatttgtggtgatttggatctgtgttttaatgagtttcacagtgtgattttgattattaattgtgcaagcttttcctaataaacgtggagaatcaca

SEQ ID NO: 33 - DNA, 2265 bp, homo sapiens
cggcccagcggaccccagcctctgccaggttcggtccgccatcctcgtcccgtcctccgccggcccctgccccgcgcccagggatcctccagctcctttcgcccgcgccctccgttcgctccggacaccatggacaagttttggtggcacgcagcctggggactctgcctcgtgccgctgagcctggcgcagatcgatttgaatataacctgccgctttgcaggtgtattccacgtggagaaaaatggtcgctacagcatctctcggacggaggccgctgacctctgcaaggctttcaatagcaccttgcccacaatggcccagatggagaaagctctgagcatcggatttgagacctgcaggtatgggttcatagaagggcacgtggtgattccccggatccaccccaactccatctgtgcagcaaacaacacaggggtgtacatcctcacatccaacacctcccagtatgacacatattgcttcaatgcttcagctccacctgaagaagattgtacatcagtcacagacctgcccaatgcctttgatggaccaattaccataactattgttaaccgtgatggcacccgctatgtccagaaaggagaatacagaacgaatcctgaagacatctaccccagcaaccctactgatgatgacgtgagcagcggctcctccagtgaaaggagcagcacttcaggaggttacatcttttacaccttttctactgtacaccccatcccagacgaagacagtccctggatcaccgacagcacagacagaatccctgctaccagtacgtcttcaaataccatctcagcaggctgggagccaaatgaagaaaatgaagatgaaagagacagacacctcagtttttctggatcaggcattgatgatgatgaagattttatctccagcaccatttcaaccacaccacgggcttttgaccacacaaaacagaaccaggactggacccagtggaacccaagccattcaaatccggaagtgctacttcagacaaccacaaggatgactgatgtagacagaaatggcaccactgcttatgaaggaaactggaacccagaagcacaccctcccctcattcaccatgagcatcatgaggaagaagagaccccacattctacaagcacaatccaggcaactcctagtagtacaacggaagaaacagctacccagaaggaacagtggtttggcaacagatggcatgtgggatatcgccaaacacccaaagaagactcccattcgacaacagggacagctgcagcctcagctcataccagccatccaatgcaaggaaggacaacaccaagcccagaggacagttcctggactgatttcttcaacccaatctcacaccccatgggacgaggtcatcaagcaggaagaaggatggatatggactccagtcatagtacaacgcttcagcctactgcaaatccaaacacaggtttggtggaagatttggacaggacaggacctctttcaatgacaacgcagcagagtaattctcagagcttctctacatcacatgaaggcttggaagaagataaagaccatccaacaacttctactctgacatcaagcaataggaatgatgtcacaggtggaagaagagacccaaatcattctgaaggctcaactactttactggaaggttatacctctcattacccacacacgaaggaaagcaggaccttcatcccagtgacctcagctaagactgggtcctttggagttactgcagttactgttggagattccaactctaatgtcaatcgttccttatcaggagaccaagacacattccaccccagtggggggtcccataccactcatggatctgaatcagatggacactcacatgggagtcaagaaggtggagcaaacacaacctctggtcctataaggacaccccaaattccagaatggctgatcatcttggcatccctcttggccttggctttgattcttgcagtttgcattgcagtcaacagtcgaagaaggtgtgggcagaagaaaaagctagtgatcaacagtggcaatggagctgtggaggacagaaagccaagtggactcaacggagaggccagcaagtctcaggaaatggtgcatttggtgaacaaggagtcgtcagaaactccagaccagtttatgacagctgatgagacaaggaacctgcagaatgtggacatgaagattggggtgtaacacctacaccattatcttggaaagaaacaaccgttg

SEQ ID NO: 34 - DNA, 3305 bp, homo sapiens
gcccacctgtcctgcagcactggatgctttgtgagttggggattgttgcgtcccatatctggacccagaagggacttccctgctcggctggctctcggtttctctgctttcctccggagaaataacagcgtcttccgcgccgcgcatggagcctcccggccgccgcgagtgtccctttccttcctggcgctttcctgggttgcttctggcggccatggtgttgctgctgtactccttctccgatgcctgtgaggagccaccaacatttgaagctatggagctcattggtaaaccaaaaccctactatgagattggtgaacgagtagattataagtgtaaaaaaggatacttctatatacctcctcttgccacccatactatttgtgatcggaatcatacatggctacctgtctcagatgacgcctgttatagagaaacatgtccatatatacgggatcctttaaatggccaagcagtccctgcaaatgggacttacgagtttggttatcagatgcactttatttgtaatgagggttattacttaattggtgaagaaattctatattgtgaacttaaaggatcagtagcaatttggagcggtaagcccccaatatgtgaaaaggttttgtgtacaccacctccaaaaataaaaaatggaaaacacacctttagtgaagtagaagtatttgagtatcttgatgcagtaacttatagttgtgatcctgcacctggaccagatccattttcacttattggagagagcacgatttattgtggtgacaattcagtgtggagtcgtgctgctccagagtgtaaagtggtcaaatgtcgatttccagtagtcgaaaatggaaaacagatatcaggatttggaaaaaaattttactacaaagcaacagttatgtttgaatgcgataagggtttttacctcgatggcagcgacacaattgtctgtgacagtaacagtacttgggatcccccagttccaaagtgtcttaaagtgtcgacttcttccactacaaaatctccagcgtccagtgcctcaggtcctaggcctacttacaagcctccagtctcaaattatccaggatatcctaaacctgaggaaggaatacttgacagtttggatgtttgggtcattgctgtgattgttattgccatagttgttggagttgcagtaatttgtgttgtcccgtacagatatcttcaaaggaggaagaagaaaggcacatacctaactgatgagacccacagagaagtaaaatttacttctctctgagaaggagagatgagagaaaggtttgcttttatcattaaaaggaaagcagatggtggagctgaatatgccacttaccagactaaatcaaccactccagcagagcagagaggctgaatagattccacaacctggtttgccagttcatcttttgactctattaaaatcttcaatagttgttattctgtagtttcactctcatgagtgcaactgtggcttagctaatattgcaatgtggcttgaatgtaggtagcatcctttgatgcttctttgaaacttgtatgaatttgggtatgaacagattgcctgctttcccttaaataacacttagatttattggaccagtcagcacagcatgcctggttgtattaaagcagggatatgctgtattttataaaattggcaaaattagagaaatatagttcacaatgaaattatattttctttgtaaagaaagtggcttgaaatcttttttgttcaaagattaatgccaactcttaagattattctttcaccaactatagaatgtattttatatatcgttcattgtaaaaagcccttaaaaatatgtgtatactactttggctcttgtgcataaaaacaagaacactgaaaattgggaatatgcacaaacttggcttctttaaccaagaatattattggaaaattctctaaaagttaatagggtaaattctctattttttgtaatgtgttcggtgatttcagaaagctagaaagtgtatgtgtggcatttgttttcactttttaaaacatccctaactgatcgaatatatcagtaatttcagaatcagatgcatcctttcataagaagtgagaggactctgacagccataacaggagtgccacttcatggtgcgaagtgaacactgtagtcttgttgttttcccaaagagaactccgtatgttctcttaggttgagtaacccactctgaattctggttacatgtgtttttctctccctccttaaataaagagaggggttaaacatgccctctaaaagtaggtggttttgaagagaataaattcatcagataacctcaagtcacatgagaatcttagtccatttacattgccttggctagtaaaagccatctatgtatatgtcttacctcatctcctaaaaggcagagtacaaagtaagccatgtatctcaggaaggtaacttcattttgtctatttgctgttgattgtaccaagggatggaagaagtaaatatagctcaggtagcactttatactcaggcagatctcagccctctactgagtcccttagccaagcagtttctttcaaagaagccagcaggcgaaaagcagggactgccactgcatttcatatcacactgttaaaagttgtgttttgaaattttatgtttagttgcacaaattgggccaaagaaacattgccttgaggaagatatgattggaaaatcaagagtgtagaagaataaatactgttttactgtccaaagacatgtttatagtgctctgtaaatgttcctttcctttgtagtctctggcaagatgctttaggaagataaaagtttgaggagaacaaacaggaattctgaattaagcacagagttgaagtttatacccgtttcacatgcttttcaagaatgtcgcaattactaagaagcagataatggtgttttttagaaacctaattgaagtatattcaaccaaatactttaatgtataaaataaatattatacaatatacttgtatagcagtttctgcttcacatttgattttttcaaatttaatatttatattagagatctatatatgtataaatatgtattttgtcaaatttgttacttaaatatatagagaccagttttctctggaagtttgtttaaatgacagaagcgtatatgaattcaagaaaatttaagctgcaaaaatgtatttgctataaaatgagaagtctcactgatagaggttctttattgctcattttttaaaaaatggactcttgaaatctgttaaaataaaattgtacatttgg

SEQ ID NO: 35 - DNA, 3969 bp, homo sapiens
gaattccgaaagcaaggagatggccaccaaggagaagctgcagtgtctgaaagatttccacaaggacatggtgaagccctcaccagggaagagcccaggcacgcggcctgaggacgaggctgagggaaaacctccgcagagggagaagtggtctagcaagatcgactttgtgctctctgtggctggcggcttcgtgggcttgggcaacgtctggcgcttcccgtacctctgctacaagaatggtggaggtgcgtttctcataccgtattttattttcctgtttgggagcggcctgcctgtgtttttcttggagatcatcataggccagtacacctctgaagggggcatcacctgctgggaaaagatctgccccttgttctctggtatcggctatgcctccgttgtaattgtgtccctcctgaatgtctactacatcgtcatcctggcctgggccacatactacctgttccagtccttccagaaggagctgccctgggcacactgcaaccacagctggaacacacctcactgcatggaggacaccatgcgcaagaacaagagtgtctggatcaccatcagctccaccaacttcacctcccctgtcatcgagttctgggagcgcaacgtgctgagcttgtcccctggaatcgaccacccaggctctctgaaatgggacctcgctctctgccttcttttagtctggctagtgtgtttcttctgcatctgcaagggcgtcaggtccactgggaaggtcgtctacttcacagccacttttccattcgccatgctcctggtgctgctggtccgagggctgacgctgccgggcgcgggccgaggcatcaagttctatctgtatcctgacatcacccgccttgaggacccacaggtgtggattgacgctgggactcagatattcttctcttatgccatctgcctgggggctatgacctcgctggggagctacaacaagtacaagtataactcgtacagggactgtatgctgctgggatgcctgaacagtggtaccagttttgtgtctggcttcgcaattttttccatcctgggcttcatggcacaagagcaaggggtggacattgctgatgtggctgagtcaggtcctggcctggccttcattgcctacccaaaagctgtgacaatgatgccgctgcccacattttggtccattcttttttttattatgcttctcttgcttggactggatagccagtttgttgaagttgaaggacagatcacatccttggttgatctttacccatccttcctaaggaagggttatcgtcgggaaatcttcatcgccttcgtgtgtagcatcagctacctgctggggctgacgatggtgacggagggtggcatgtatgtgtttcagctctttgactactatgcagctagcggtgtatgccttttgtgggttgcattctttgaatgttttgttattgcctggatatatggaggtgataacctttatgatggtattgaggacatgattggctatcggcccgggccctggatgaagtacagctgggtgatcactccagttctctgtgttggatgtttcatcttctcgctcgtcaagtacgtacccctgacctacaacaaaacatacgtgtccccaacttgggccattgggctgggctggagcctggccctttcctccatgctctgcgttcccttggtcatcgtcatccgcctctgccagactgaggggccgttccttgtgagagtcaagtacctgctgaccccaagggaacccaaccgctgggctgtggagcgcgagggagccacaccttacaactctcgcaccgtcatgaacggcgctctcgtgaaaccgacccacatcattgtggagaccatgatgtgagctctctcgggtcgacggggccggcggctttcctgctgtttactaacattagattcacataggaccaggtttacagagctttatatttgcactaggatttttttttttttgtaattgtcacagaaaatgtaattgtgggtatgtgtgcgtgcgtgtgtgtgtgtgtgtgtgtgtatcgtgtgtgtgtgttttgttttgatttgggggatattttgtacaaaaagaaaacccacgggaagatgtccgtggagaggcagagctttcatactgaattagatgtattttatgggaatttggtaaatttttctttgtatttttttttttacatataagtatatatacacttagagattgtcatatacttttaccacttgaattgatcttcttgccagcaatagatctcattttcaaaagcaattcttcggtgctgtgtagctggcagaaagttctgtccagtaaacgcaggatggaattttcctgggactctacacccatcttaaggtggtataccttccaaatcctggttcagatggaagaaatagcaggagagaggacccattagctggcagacccaggggaagaaaggagggctgtgaggagatacctcattaaacttggcttagtgaagaagagagatgccaaaggaatgaaccaacccttcacataaaggagactggctgaagctgaatgaggaggccctatagcagaagtctgattctaagagcagtagaaacttgtaccagaagcaaaatcccacttttaattttgagatggtgagtggatagtcagtagaccgtcagaaccactggccagagagggagctgctagagatccaagaaggctggcaggaatgaggctcacaactcagcctcgcaagaggtggcagaggcacaggaggccacagtccttcctggggcattccaggcagagaaggagcagaggctctcccggcaggagctggggtctcagggctcagatgagtctgttgcatttgaatggggtcatagcaggttctggtcattccccaagcaacatctcagcatctcttaaagttgcctgcaggaatgaagcatgacatacctgttgagggactaggggagtggtggggaggtgagtggaccaaaggatataggccccaggcatgcagatgggcccggtgtcggggaggggtgctttctttcctcatctccccactccccactctcagcctgggagactcctgccaagccctcattaaagatgccaccctgggctgccctggcacctagcaaggcacaccaagaacagcttttgagtcgtatcctccactggggaagtgctcccagttcagaacaagggcagcccgtggtgctgacctaggatataacaaagctcttcacttcaaaacccctgcaatagctgggtttacagacatttaccacctggggacccaaaagagaaggcctaggagagttttctagaaggttgggattgtcagggtcctggccccccagaactggcttgatcaagggccttatgtggagcagaggttgtctctgaaccaggagagaaggtactatacctttcaaatccccagggcagacacacccccacccagcccctatttggacctaaactgtgccatttgaacagtcacttccaagctcagtctaaatgaaaccgaaacgtgaccacgcacaaaggcagtcactgctcgaggggtgcagaccgcagaattttcacagcaggggctcttggaactctggaaacccccttcttaaatttgggaggaggagtatgcctttggtgtccccctcccaagggcaattctgaaccccatctttggcaggcatacatatttcactgtttccaaagctatctactctgccaaacaacacccagtcctattccaaactctcaacgattctatcttgttcctgtttttctatgtatttatggttgccgtttgtgtctgatttgattttactgttttttccctgattttatggagtagcattgtgacctgttttcctttgtcttatataactttagtaaactaaccactgtcaatgattgagggcaggtggcacgtggggaagagggcggaattc

SEQ ID NO: 36 - DNA, 1833 bp, homo sapiens
gcgcgcccacccggtagaggacccccgcccgtgccccgaccggtccccgcctttttgtaaaacttaaagcgggcgcagcattaacgcttcccgccccggtgacctctcaggggtctccccgccaaaggtgctccgccgctaaggaacatggcgaaggtggagcaggtcctgagcctcgagccgcagcacgagctcaaattccgaggtcccttcaccgatgttgtcaccaccaacctaaagcttggcaacccgacagaccgaaatgtgtgttttaaggtgaagactacagcaccacgtaggtactgtgtgaggcccaacagcggaatcatcgatgcaggggcctcaattaatgtatctggaagaagatggactgcggatgaggaagacagtgcagagcaacagccccatttcagcattagccccaactgggaaggaagaaggccttagcacccggctcttggctctggtggttttgttctttatcgttggtgtaattattgggaagattgccttgtagaggtagcatgcacaggatggtaaattggattggtggatccaccatatcatgggatttaaatttatcataaccatgtgtaaaaagaaattaatgtatgatgacatctcacaggtcttgcctttaaattacccctccctgcacacacatacacagatacacacacacaaatataatgtaacgatcttttagaaagttaaaaatgtatagtaactgattgagggggaaaagaatgatctttattaatgacaagggaaaccatgagtaatgccacaatggcatattgtaaatgtcattttaaacattggtaggccttggtacatgatgctggattacctctcttaaaatgacacccttcctcgcctgttggtgctggcccttggggagctggagcccagcatgctggggagtgcggtcagctccacacagtagtccccacgtggcccactcccggcccaggctgctttccgtgtcttcagttctgtccaagccatcagctccttgggactgatgaacagagtcagaagcccaaaggaattgcactgtggcagcatcagacgtactcgtcataagtgagaggcgtgtgttgactgattgacccagcgctttggaaataaatggcagtgctttgttcacttaaagggaccaagctaaatttgtattggttcatgtagtgaagtcaaactgttattcagagatgtttaatgcatatttaacttatttaatgtatttcatctcatgttttcttattgtcacaagagtacagttaatgctgcgtgctgctgaactctgttgggtgaactggtattgctgctggagggctgtgggctcctctgtctctggagagtctggtcatgtggaggtggggtttattgggatgctggagaagagctgccaggaagtgttttttctgggtcagtaaataacaactgtcatagggagggaaattctcagtagtgacagtcaactctaggttaccttttttaatgaagagtagtcagtcttctagattgttcttataccacctctcaaccattactcacacttccagcgcccaggtccaagtctgagcctgacctccccttggggacctagcctggagtcaggacaaatggatcgggctgcagagggttagaagcgagggcaccagcagttgtgggtggggagcaagggaagagagaaactcttcagcgaatccttctagtactagttgagagtttgactgtgaattaattttatgccataaaagaccaacccagttctgtttgactatgtagcatcttgaaaagaaaaattataataaagccccaaaattaaga

SEQ ID NO: 37 - DNA, 3213 bp, homo sapiens
agagactcaagatgattccctttttacccatgttttctctactattgctgcttattgttaaccctataaacgccaacaatcattatgacaagatcttggctcatagtcgtatcaggggtcgggaccaaggcccaaatgtctgtgcccttcaacagattttgggcaccaaaaagaaatacttcagcacttgtaagaactggtataaaaagtccatctgtggacagaaaacgactgttttatatgaatgttgccctggttatatgagaatggaaggaatgaaaggctgcccagcagttttgcccattgaccatgtttatggcactctgggcatcgtgggagccaccacaacgcagcgctattctgacgcctcaaaactgagggaggagatcgagggaaagggatccttcacttactttgcaccgagtaatgaggcttgggacaacttggattctgatatccgtagaggtttggagagcaacgtgaatgttgaattactgaatgctttacatagtcacatgattaataagagaatgttgaccaaggacttaaaaaatggcatgattattccttcaatgtataacaatttggggcttttcattaaccattatcctaatggggttgtcactgttaattgtgctcgaatcatccatgggaaccagattgcaacaaatggtgttgtccatgtcattgaccgtgtgcttacacaaattggtacctcaattcaagacttcattgaagcagaagatgacctttcatcttttagagcagctgccatcacatcggacatattggaggcccttggaagagacggtcacttcacactctttgctcccaccaatgaggcttttgagaaacttccacgaggtgtcctagaaaggttcatgggagacaaagtggcttccgaagctcttatgaagtaccacatcttaaatactctccagtgttctgagtctattatgggaggagcagtctttgagacgctggaaggaaatacaattgagataggatgtgacggtgacagtataacagtaaatggaatcaaaatggtgaacaaaaaggatattgtgacaaataatggtgtgatccatttgattgatcaggtcctaattcctgattctgccaaacaagttattgagctggctggaaaacagcaaaccaccttcacggatcttgtggcccaattaggcttggcatctgctctgaggccagatggagaatacactttgctggcacctgtgaataatgcattttctgatgatactctcagcatggttcagcgcctccttaaattaattctgcagaatcacatattgaaagtaaaagttggccttaatgagctttacaacgggcaaatactggaaaccatcggaggcaaacagctcagagtcttcgtatatcgtacagctgtctgcattgaaaattcatgcatggagaaagggagtaagcaagggagaaacggtgcgattcacatattccgcgagatcatcaagccagcagagaaatccctccatgaaaagttaaaacaagataagcgctttagcaccttcctcagcctacttgaagctgcagacttgaaagagctcctgacacaacctggagactggacattatttgtgccaaccaatgatgcttttaagggaatgactagtgaagaaaaagaaattctgatacgggacaaaaatgctcttcaaaacatcattctttatcacctgacaccaggagttttcattggaaaaggatttgaacctggtgttactaacattttaaagaccacacaaggaagcaaaatctttctgaaagaagtaaatgatacacttctggtgaatgaattgaaatcaaaagaatctgacatcatgacaacaaatggtgtaattcatgttgtagataaactcctctatccagcagacacacctgttggaaatgatcaactgctggaaatacttaataaattaatcaaatacatccaaattaagtttgttcgtggtagcaccttcaaagaaatccccgtgactgtctatacaactaaaattataaccaaagttgtggaaccaaaaattaaagtgattgaaggcagtcttcagcctattatcaaaactgaaggacccacactaacaaaagtcaaaattgaaggtgaacctgaattcagactgattaaagaaggtgaaacaataactgaagtgatccatggagagccaattattaaaaaatacaccaaaatcattgatggagtgcctgtggaaataactgaaaaagagacacgagaagaacgaatcattacaggtcctgaaataaaatacactaggatttctactggaggtggagaaacagaagaaactctgaagaaattgttacaagaagaggtcaccaaggtcaccaaattcattgaaggtggtgatggtcatttatttgaagatgaagaaattaaaagactgcttcagggagacacacccgtgaggaagttgcaagccaacaaaaaagttcaaggttctagaagacgattaagggaaggtcgttctcagtgaaaatccaaaaaccagaaaaaaatgtttatacaaccctaagtcaataacctgaccttagaaaattgtgagagccaagttgacttcaggaactgaaacatcagcacaaagaagcaatcatcaaataattctgaacacaaatttaatatttttttttctgaatgagaaacatgagggaaattgtggagttagcctcctgtggtaaaggaattgaagaaaatataacaccttacaccctttttcatcttgacattaaaagttctggctaactttggaatccattagagaaaaatccttgtcaccagattcattacaattcaaatcgaagagttgtgaactgttatcccattgaaaagaccgagccttgtatgtatgttatggatacataaaatgcacgcaagccattatctctccatgggaagctaagttataaaaataggtgcttggtgtacaaaactttttatatcaaaaggctttgcacatttctatatgagtgggtttactggtaaattatgttattttttacaactaattttgtactctcagaatgtttgtcatatgcttcttgcaatgcatattttttaatctcaaacgtttcaataaaaccatttttcagatataaagagaattacttcaaattgagtaattcagaaaaactcaagatttaagttaaaaagtggtttggacttgggaa

SEQ ID NO: 38 - DNA, 1412 bp, homo sapiens
cggggtcgtccgcaaagcctgagtcctgtcctttctctctccccggacagcatgagcttcaccactcgctccaccttctccaccaactaccggtccctgggctctgtccaggcgcccagctacggcgcccggccggtcagcagcgcggccagcgtctatgcaggcgctgggggctctggttcccggatctccgtgtcccgctccaccagcttcaggggcggcatggggtccgggggcctggccaccgggatagccgggggtctggcaggaatgggaggcatccagaacgagaaggagaccatgcaaagcctgaacgaccgcctggcctcttacctggacagagtgaggagcctggagaccgagaaccggaggctggagagcaaaatccgggagcacttggagaagaagggaccccaggtcagagactggagccattacttcaagatcatcgaggacctgagggctcagatcttcgcaaatactgtggacaatgcccgcatcgttctgcagattgacaatgcccgtcttgctgctgatgactttagagtcaagtatgagacagagctggccatgcgccagtctgtggagaacgacatccatgggctccgcaaggtcattgatgacaccaatatcacacgactgcagctggagacagagatcgaggctctcaaggaggagctgctcttcatgaagaagaaccacgaagaggaagtaaaaggcctacaagcccagattgccagctctgggttgaccgtggaggtagatgcccccaaatctcaggacctcgccaagatcatggcagacatccgggcccaatatgacgagctggctcggaagaaccgagaggagctagacaagtactggtctcagcagattgaggagagcaccacagtggtcaccacacagtctgctgaggttggagctgctgagacgacgctcacagagctgagacgtacagtccagtccttggagatcgacctggactccatgagaaatctgaaggccagcttggagaacagcctgagggaggtggaggcccgctacgccctacagatggagcagctcaacgggatcctgctgcaccttgagtcagagctggcacagacccgggcagagggacagcgccaggcccaggagtatgaggccctgctgaacatcaaggtcaagctggaggctgagatcgccacctaccgccgcctgctggaagatggcgaggactttaatcttggtgatgccttggacagcagcaactccatgcaaaccatccaaaagaccaccacccgccggatagtggatggcaaagtggtgtctgagaccaatgacaccaaagttctgaggcattaagccagcagaagcagggtaccctttggggagcaggaggccaataaaaagttcagagttcattggatgtc

SEQ ID NO: 39 - protein, 829 aa, homo sapiens [sequence omitted]

SEQ ID NO: 40 - protein, 1400 aa, homo sapiens
MELLPPLPQSFLLLLLLPAKPAAGEDWQCPRTPYAASRDFDVKYVVPSFSAGGLVQAMVTYEGDRNESAVFVAIRNRLHVLGPDLKSVQSLATGPAGDPGCQTCAACGPGPHGPPGDTDTKVLVLDPALPALVSCGSSLQGRCFLHDLEPQGTAVHLAAPACLFSAHHNRPDDCPDCVASPLGTRVTVVEQGQASYFYVASSLDAAVAGSFSPRSVSIRRLKADASGFAPGFVALSVLPKHLVSYSIEYVHSFHTGAFVYFLTVQPASVTDDPSALHTRLARLSATEPELGDYRELVLDCRFAPKRRRRGAPEGGQPYPVLQVAHSAPVGAQLATELSIAEGQEVLFGVFVTGKDGGPGVGPNSVVCAFPIDLLDTLIDEGVERCCESPVHPGLRRGLDFFQSPSFCPNPPGLEALSPNTSCRHFPLLVSSSFSRVDLFNGLLGPVQVTALYVTRLDNVTVAHMGTMDGRILQVELVRSLNYLLYVSNFSLGDSGQPVQRDVSRLGDHLLFASGDQVFQVPIRGPGCRHFLTCGRCLRAWHFMGCGWCGNMCGQQKECPGSWQQDHCPPKLTEFHPHSGPLRGSTRLTLCGSNFYLHPSGLVPEGTHQVTVGQSPCRPLPKDSSKLRPVPRKDFVEEFECELEPLGTQAVGPTNVSLTVTNMPPGKHFRVDGTSVLRGFSFMEPVLIAVQPLFGPRAGGTCLTLEGQSLSVGTSRAVLVNGTECLLARVSEGQLLCATPPGATVASVPLSLQVGGAQVPGSWTFQYREDPVVLSISPNCGYINSHITICGQHLTSAWHLVLSFHDGLRAVESRCERQLPEQQLCRLPEYVVRDPQGWVAGNLSARGDGAAGFTLPGFRFLPPPHPPSANLVPLKPEEHAIKFEYIGLGAVADCVGINVTVGGESCQHEFRGDMVVCPLPPSLQLGQDGAPLQVCVDGECHILGRVVRPGPDGVPQSTLLGILLPLLLLVAALATALVFSYWWRRKQLVLPPNLNDLASLDQTAGATPLPILYSGSDYRSGLALPAIDGLDSTTCVHGASFSDSEDESCVPLLRKESIQLRDLDSALLAEVKDVLIPHERVVTHSDRVIGKGHFGVVYHGEYIDQAQNRIQCAIKSLSRITEMQQVEAFLREGLLMRGLNHPNVLALIGIMLPPEGLPHVLLPYMCHGDLLQFIRSPQRNPTVKDLISFGLQVARGMEYLAEQKFVHRDLAARNCMLDESFTVKVADFGLARDILDREYYSVQQHRHARLPVKWMALESLQTYRFTTKSDVWSFGVLLWELLTRGAPPYRHIDPFDLTHFLAQGRRLPQPEYCPDSLYQVMQQCWEADPAVRPTFRVLVGEVEQIVSALLGDHYVQLPATYMNLGPSTSHEMNVRPEQPQFSPMPGNVRRPRPLSEPPRPT

SEQ ID NO: 41 - protein, 693 aa, homo sapiens
MTPQSLLQTTLFLLSLLFLVQGAHGRGHREDFRFCSQRNQTHRSSLHYKPTPDLRISIENSEEALTVHAPFPAAHPASRSFPDPRGLYHFCLYWNRHAGRLHLLYGKRDFLLSDKASSLLCFQHQEESLAQGPPLLATSVTSWWSPQNISLPSAASFTFSFHSPPHTAAHNASVDMCELKRDLQLLSQFLKHPQKASRRPSAAPASQQLQSLESKLTSVRFMGDMVSFEEDRINATVWKLQPTAGLQDLHIHSRQEEEQSEIMEYSVLLPRTLFQRTKGRSGEAEKRLLLVDFSSQALFQDKNSSQVLGEKVLGIVVQNTKVANLTEPVVLTFQHQLQPKNVTLQCVFWVEDPTLSSPGHWSSAGCETVRRETQTSCFCNHLTYFAVLMVSSVEVDAVHKHYLSLLSYVGCVVSALACLVTIAAYLCSRVPLPCRRKPRDYTIKVHMNLLLAVFLLDTSFLLSEPVALTGSEAGCRASAIFLHFSLLTCLSWMGLEGYNLYRLVVEVFGTYVPGYLLKLSAMGWGFPIFLVTLVALVDVDNYGPIILAVHRTPEGVIYPSMCWIRDSLVSYITNLGLFSLVFLFNMAMLATMVVQILRLRPHTQKWSHVLTLLGLSLVLGLPWALIFFSFASGTFQLVVLYLFSIITSFQGFLIFIWYWSMRLQARGGPSPLKSNSDCARLPISSGSTSSSRI

SEQ ID NO: 42 - protein, 806 aa, homo sapiens
MGAPACALALCVAVAIVAGASSESLGTEQRVVGRAAEVPGPEPGQQEQLVFGSGDAVELSCPPPGGGPMGPTVWVKDGTGLVPSERVLVGPQRLQVLNASHEDSGAYSCRQRLTQRVLCHFSVRVTDAPSSGDDEDGEDEAEDTGVDTGAPYWTRPERMDKKLLAVPAANTVRFRCPAAGNPTPSISWLKNGREFRGEHRIGGIKLRHQQWSLVMESVVPSDRGNYTCVVENKFGSIRQTYTLDVLERSPHRPILQAGLPANQTAVLGSDVEFHCKVYSDAQPHIQWLKHVEVNGSKVGPDGTPYVTVLKTAGANTTDKELEVLSLHNVTFEDAGEYTCLAGNSIGFSHHSAWLVVLPAEEELVEADEAGSVYAGILSYGVGFFLFILVVAAVTLCRLRSPPKKGLGSPTVHKISRFPLKRQVSLESNASMSSNTPLVRIARLSSGEGPTLANVSELELPADPKWELSRARLTLGKPLGEGCFGQVVMAEAIGIDKDRAAKPVTVAVKMLKDDATDKDLSDLVSEMEMMKMIGKHKNIINLLGACTQGGPLYVLVEYAAKGNLREFLRARRPPGLDYSFDTCKPPEEQLTFKDLVSCAYQVARGMEYLASQKCIHRDLAARNVLVTEDNVMKIADFGLARDVHNLDYYKKTTNGRLPVKWMAPEALFDRVYTHQSDVWSFGVLLWEIFTLGGSPYPGIPVEELFKLLKEGHRMDKPANCTHDLYMIMRECWHAAPSQRPTFKQLVEDLDRVLTVTSTDEYLDLSAPFEQYSPGGQDTPSSSSSGDDSVFAHDLLPPAPPSSGGSRT

SEQ ID NO: 43 - protein, 807 aa, homo sapiens
MMDSPFLELWQSKAVSIREQLGLGDRPNDSYCYNSAKNSTVLQGVTFGGIPTVLLIDVSCFLFLILVFSIIRRRFWDYGRIALVSEADSESRFQRLSSTSSSGQQDFENELGCCPWLTAIFRLHDDQILEWCGEDAIHYLSFQRHIIFLLVVVSFLSLCVILPVNLSGDLLDKDPYSFGRTTIANLQTDNDLLWLHTIFAVIYLFLTVGFMRHHTQSIKYKEENLVRRTLFITGLPRDARKETVESHFRDAYPTCEVVDVQLCYNVAKLIYLCKEKKKTEKSLTYYTNLQVKTGQRTLINPKPCGQFCCCEVLGCEWEDAISYYTRMKDRLLERITEEERHVQDQPLGMAFVTFQEKSMATYILKDFNACKCQSLQCKGEPQPSSHSRELYTSKWTVTFAADPEDICWKNLSIQGLRWWLQWLGINFTLFLGLFFLTTPSIILSTMDKFNVTKPIHALNNPIISQFFPTLLLWSFSALLPSIVYYSTLLESHWTKSGENQIMMTKVYIFLIFMVLILPSLGLTSLDFFFRWLFDKTSSEASIRLECVFLPDQGAFFVNYVIASAFIGNGMELLRLPGLILYTFRMIMAKTAADRRNVKQNQAFQYEFGAMYAWMLCVFTVIVAYSITCPIIAPFGLIYILLKHMVDRHNLYFVYLPAKLEKGIHFAAVNQALAAPILCLFWLYFFSFLRLGMKAPATLFTFLVLLLTILVCLAHTCFGCFKHLSPLNYKTEEPASDKGSEAEAHMPPPFTPYVPRILNGLASERTALSPQQQQQQTYGAIHNISGTIPGQCLAQSATGSVAAAPQEA

SEQ ID NO: 44 - protein, 309 aa, homo sapiens
MNGTYNTCGSSDLTWPPAIKLGFYAYLGVLLVLGLLLNSLALWVFCCRMQQWTETRIYMTNLAVADLCLLCTLPFVLHSLRDTSDTPLCQLSQGIYLTNRYMSISLVTAIAVDRYVAVRHPLRARGLRSPRQAAAVCAVLWVLVIGSLVARWLLGIQEGGFCFRSTRHNFNSMRFPLLGFYLPLAVVVFCSLKVVTALAQRPPTDVGQAEATRKAARMVWANLLVFVVCFLPLHVGLTVRLAVGWNACALLETIRRALYITSKLSDANCCLDAICYYYMAKEFQEASALAVAPRAKAHKSQDSLCVTLA

SEQ ID NO: 45 - protein, 95 aa, homo sapiens
MTELETAMGMIIDVFSRYSGSEGSTQTLTKGELKVLMEKELPGFLQSGKDKDAVDKLLKDLDANGDAQVDFSEFIVFVAAITSACHKYFEKAGLK

SEQ ID NO: 46 - protein, 345 aa, homo sapiens
MGVCGYLFLPWKCLVVVSLRLLFLVPTGVPVRSGDATFPKAMDNVTVRQGESATLRCTIDDRVTRVAWLNRSTILYAGNDKWSIDPRVIILVNTPTQYSIMIQNVDVYDEGPYTCSVQTDNHPKTSRVHLIVQVPPQIMNISSDITVNEGSSVTLLCLAIGRPEPTVTWRHLSVKEGQGFVSEDEYLEISDIKRDQSGEYECSALNDVAAPDVRKVKITVNYPPYISKAKNTGVSVGQKGILSCEASAVPMAEFQWFKEETRLATGLDGMRIENKGRMSTLTFFNVSEKDYGNYTCVATNKLGNTNASITLYGPGAVIDGVNSASRALACLWLSGTLLAHFFIKF

SEQ ID NO: 47 - protein, 211 aa, homo sapiens
MANAGLQLLGFILAFLGWIGAIVSTALPQWRIYSYAGDNIVTAQAMYEGLWMSCVSQSTGQIQCKVFDSLLNLSSTLQATRALMVVGILLGVIAIFVATVGMKCMKCLEDDEVQKMRMAVIGGAIFLLAGLAILVATAWYGNRIVQEFYDPMTPVNARYEFGQALFTGWAAASLCLLGGALLCCSCPRKTTSYPTPRPYPKPAPSSGKDYV

SEQ ID NO: 48 - protein, 823 aa, homo sapiens
MALPRCTWPNYVWRAVMACLVHRGLGAPLTLCMLGCLLQAGHVLSQKLDDVDPLVATNFGKIRGIKKELNNEILGPVIQFLGVPYAAPPTGERRFQPPEPPSPWSDIRNATQFAPVCPQNIIDGRLPEVMLPVWFTNNLDVVSSYVQDQSEDCLYLNIYVPTEDDIRDSGGPKPVMVYIHGGSYMEGTGNLYDGSVLASYGNVIVITVNYRLGVLGFLSTGDQAAKGNYGLLDLIQALRWTSENIGFFGGDPLRITVFGSGAGGSCVNLLTLSHYSEGNRWSNSTKGLFQRAIAQSGTALSSWAVSFQPAKYARMLATKVGCNVSDTVELVECLQKKPYKELVDQDIQPARYHIAFGPVIDGDVIPDDPQILMEQGEFLNYDIMLGVNQGEGLKFVENIVDSDDGISASDFDFAVSNFVDNLYGYPEGKDVLRETIKFMYTDWADRHNPETRRKTLLALFTDHQWVAPAVATADLHSNFGSPTYFYAFYHHCQTDQVPAWADAAHGDEVPYVLGIPMIGPTELFPCNFSKNDVMLSAVVMTYWTNFAKTGDPNQPVPQDTKFIHTKPNRFEEVAWTRYSQKDQLYLHIGLKPRVKEHYRANKVNLWLELVPHLHNLNDISQYTSTTTKVPSTDITFRPTRKNSVPVTSAFPTAKQDDPKQQPSPFSVDQRDYSTELSVTIAVGASLLFLNILAFAALYYKKDKRRHDVHRRCSPQRTTTNDLTHAQEEEIMSLQMKHTDLDHECESIHPHEVVLRTACPPDYTLAMRRSPDDVPLMTPNTITMIPNTIPGIQPLHTFNTFTGGQNNTLPHPHPHPHSHSTTRV

SEQ ID NO: 49 - protein, 556 aa, homo sapiens
MPSFDEALQRVGEFGRFQRRVFLLLCLTGVTFAFLFVGVVFLGTQPDHYWCRGPSAAALAERCGWSPEEEWNRTAPASRGPEPPERRGRCQRYLLEAANDSASATSALSCADPLAAFPNRSAPLVPCRGGWRYAQAHSTIVSEFDLVCVNAWMLDLTQAILNLGFLTGAFTLGYAADRYGRIVIYLLSCLGVGVTGVVVAFAPNFPVFVIFRFLQGVFGKGTWMTCYVIVTEIVGSKQRRIVGIVIQMFFTLGIIILPGIAYFIPNWQGIQLAITLPSFLFLLYYWVVPESPRWLITRKKGDKALQILRRIAKCNGKYLSSNYSEITVTDEEVSNPSFLDLVRTPQMRKCTLILMFAWFTSAVVYQGLVMRLGIIGGNLYIDFFISGVVELPGALLILLTIERLGRRLPFAASNIVAGVACLVTAFLPEGIAWLRTTVATLGRLGITMAFEIVYLVNSELYPTTLRNFGVSLCSGLCDFGGIIAPFLLFRLAAVWLELPLIIFGILASICGGLVMLLPETKGIALPETVDDVEKLGSPHSCKCGRNKKTPVSRSHL

SEQ ID NO: 50 - protein, 189 aa, homo sapiens
MEEGGNLGGLIKMVHLLVLSGAWGMQMWVTFVSGFLLFRSLPRHTFGLVQSKLFPFYFHISMGCAFINLCILASQHAWAQLTFWEASQLYLLFLSLTLATVNARWLEPRTTAAMWALQTVEKERGLGGEVPGSHQGPDPYRQLREKDPKYSALRQNFFRYHGLSSLCNLGCVLSNGLCLAGLALEIRSL

SEQ ID NO: 51 - protein, 184 aa, homo sapiens
MSWVPGVGMEIRGEPGSALTPLWSPYPAGFLLFRSLPRHTFGLVQSKLFPFYFHISMGCAFINLCILASQHAWAQLTFWEASQLYLLFLSLTLATVNARWLEPRTTAAMWALQTVEKERGLGGEVPGSHQGPDPYRQLREKDPKYSALRQNFFRYHGLSSLCNLGCVLSNGLCLAGLALEIRSL

SEQ ID NO: 52 - protein, 168 aa, homo sapiens
MEEGGNLGGLIKMVHLLVLSGAWGMQMWVTFVSGFLLFRSLPRHTFGLVQSKLFPFYFHISMGCAFINLCILASQHAWAQLTFWEASQLYLLFLSLTLATVNARLGGEVPGSHQGPDPYRQLREKDPKYSALRQNFFRYHGLSSLCNLGCVLSNGLCLAGLALEIRSL

SEQ ID NO: 53 - protein, 339 aa, homo sapiens
MESRKDITNQEELWKMKPRRNLEEDDYLHKDTGETSMLKRPVLLHLHQTAHADEFDCPSELQHTQELFPQWHLPIKIAAIIASLTFLYTLLREVIHPLATSHQQYFYKIPILVINKVLPMVSITLLALVYLPGVIAAIVQLHNGTKYKKFPHWLDKWMLTRKQFGLLSFFFAVLHAIYSLSYPMRRSYRYKLLNWAYQQVQQNKEDAWIEHDVWRMEIYVSLGIVGLAILALLAVTSIPSVSDSLTWREFHYIQSKLGIVSLLLGTIHALIFAWNKWIDIKQFVWYTPPTFMIAVFLPIVVLIFKSILFLPCLRKKILKIRHGWEDVTKINKTEICSQL

SEQ ID NO: 54 - protein, 230 aa, homo sapiens
MASLGLQLVGYILGLLGLLGTLVAMLLPSWKTSSYVGASIVTAVGFSKGLWMECATHSTGITQCDIYSTLLGLPADIQAAQAMMVTSSAISSLACIISVVGMRCTVFCQESRAKDRVAVAGGVFFILGGLLGFIPVAWNLHGILRDFYSPLVPDSMKFEIGEALYLGIISSLFSLIAGIILCFSCSSQRNRSNYYDAYQAQPLATRSSPRPGQPPKVKSEFNSYSLTGYV

SEQ ID NO: 55 - protein, 470 aa, homo sapiens
MEPSLSSETIERLEVSSLAQTSSAVASSTDGSIHTDSVDGTPDPQRTKAAIAHLQQKILKLTEQIKIAQTARDDNVAEYLKLANSADKQQAARIKQVFEKKNQKSAQTILQLQKKLEHYHRKLREVEQNGIPRQPKDVFRDMHQGLKDVGAKVTGFSEGVVDSVKGGFSSFSQATHSAAGAVVSKPREIASLIRNKFGSADNIPNLKDSLEEGQVDDAGKALGVISNFQSSPKYGSEEDCSSATSGSVGANSTTGGIAVGASSSKTNTLDMQSSGFDALLHEIQEIRETQARLEESFETLKEHYQRDYSLIMQTLQEERYRCERLEEQLNDLTELHQNEILNLKQELASMEEKIAYQSYERARDIQEALEACQTRISKMELQQQQQQVVQLEGLENATARNLLGKLINILLAVMAVLLVFVSTVANCVVPLMKTRNRTFSTLFLVVFIAFLWKHWDALFSYVERFFSSPR

SEQ ID NO: 56 - protein, 381 aa, homo sapiens
MTVARPSVPAALPLLGELPRLLLLVLLCLPAVWGDCGLPPDVPNAQPALEGRTSFPEDTVITYKCEESFVKIPGEKDSVICLKGSQWSDIEEFCNRSCEVPTRLNSASLKQPYITQNYFPVGTVVEYECRPGYRREPSLSPKLTCLQNLKWSTAVEFCKKKSCPNPGEIRNGQIDVPGGILFGATISFSCNTGYKLFGSTSSFCLISGSSVQWSDPLPECREIYCPAPPQIDNGIIQGERDHYGYRQSVTYACNKGFTMIGEHSIYCTVNNDEGEWSGPPPECRGKSLTSKVPPTVQKPTTVNVPTTEVSPTSQKTTTKTTTPNAQATRSTPVSRTTKHFHETTPNKGSGTTSGTTRLLSGHTCFTLTGLLGTLVTMGLLT

SEQ ID NO: 57 - protein, 722 aa, homo sapiens
MPLHQLGDKPLTFPSPNSAMENGLDHTPPSRRASPGTPLSPGSLRSAAHSPLDTSKQPLCQLWAEKHGARGTHEVRYVSAGQSVACGWWAFAPPCLQVLNTPKGILFFLCAAAFLQGMTVNGFINTVITSLERRYDLHSYQSGLIASSYDIAACLCLTFVSYFGGSGHKPRWLGWGVLLMGTGSLVFALPHFTAGRYEVELDAGVRTCPANPGAVCADSTSGLSRYQLVFMLGQFLHGVGATPLYTLGVTYLDENVKSSCSPVYIAIFYTAAILGPAAGYLIGGALLNIYTEMGRRTELTTESPLWVGAWWVGFLGSGAAAFFTAVPILGYPRQLPGSQRYAVMRAAEMHQLKDSSRGEASNPDFGKTIRDLPLSIWLLLKNPTFILLCLAGATEATLITGMSTFSPKFLESQFSLSASEAATLFGYLVVPAGGGGTFLGGFFVNKLRLRGSAVIKFCLFCTVVSLLGILVFSLHCPSVPMAGVTASYGGSLLPEGHLNLTAPCNAACSCQPEHYSPVCGSDGLMYFSLCHAGCPAATETNVDGQKVYRDCSCIPQNLSSGFGHATAGKCTSTCQRKPLLLVFIFVVIFFTFLSSIPALTATLRCVRDPQRSFALGIQWIVVRILGGIPGPIAFGWVIDKACLLWQDQCGQQGSCLVYQNSAMSRYILIMGLLYKVLGVLFFAIACFLYKPLSESSDGLETCLPSQSSAPDSATDSQLQSSV

SEQ ID NO: 58 - protein, 1212 aa, homo sapiens
MEPRPTAPSSGAPGLAGVGETPSAAALAAARVELPGTAVPSVPEDAAPASRDGGGVRDEGPAAAGDGLGRPLGPTPSQSRFQVDLVSENAGRAAAAAAAAAAAAAAAGAGAGAKQTPADGEASGESEPAKGSEEAKGRFRVNFVDPAASSSAEDSLSDAAGVGVDGPNVSFQNGGDTVLSEGSSLHSGGGGGSGHHQHYYYDTHTNTYYLRTFGHNTMDAVPRIDHYRHTAAQLGEKLLRPSLAELHDELEKEPFEDGFANGEESTPTRDAVVTYTAESKGVVKFGWIKGVLVRCMLNIWGVMLFIRLSWIVGQAGIGLSVLVIMMATVVTTITGLSTSAIATNGFVRGGGAYYLISRSLGPEFGGAIGLIFAFANAVAVAMYVVGFAETVVELLKEHSILMIDEINDIRIIGAITVVILLGISVAGMEWEAKAQIVLLVILLLAIGDFVIGTFIPLESKKPKGFFGYKSEIFNENFGPDFREEETFFSVFAIFFPAATGILAGANISGDLADPQSAIPKGTLLAILITTLVYVGIAVSVGSCVVRDATGNVNDTIVTELTNCTSAACKLNFDFSSCESSPCSYGLMNNFQVMSMVSGFTPLISAGIFSATLSSALASLVSAPKIFQALCKDNIYPAFQMFAKGYGKNNEPLRGYILTFLIALGFILIAELNVIAPIISNFFLASYALINFSVFHASLAKSPGWRPAFKYYNMWISLLGAILCCIVMFVINWWAALLTYVIVLGLYIYVTYKKPDVNWGSSTQALTYLNALQHSIRLSGVEDHVKNFRPQCLVMTGAPNSRPALLHLVHDFTKNVGLMICGHVHMGPRRQAMKEMSIDQAKYQRWLIKNKMKAFYAPVHADDLREGAQYLMQAAGLGRMKPNTLVLGFKKDWLQADMRDVDMYINLFHDAFDIQYGVVVIRLKEGLDISHLQGQEELLSSQEKSPGTKDVVVSVEYSKKSDLDTSKPLSEKPITHKVEEEDGKTATQPLLKKESKGPIVPLNVADQKLLEASTQFQKKQGKNTIDVWWLFDDGGLTLLIPYLLTTKKKWKDCKIRVFIGGKINRIDHDRRAMATLLSKFRIDFSDIMVLGDINTKPKKENIIAFEEIIEPYRLHEDDKEQDIADKMKEDEPWRITDNELELYKTKTYRQIRLNELLKEHSSTANIIVMSLPVARKGAVSSALYMAWLEALSKDLPPILLVRGNHQSVLTFYS

SEQ ID NO: 59 - protein, 475 aa, homo sapiens
MTPGTQSPFFLLLLLTVLTVVTGSGHASSTPGGEKETSATQRSSVPSSTEKNAVSMTSSVLSSHSPGSGSSTTQGQDVTLAPATEPASGSAATWGQDVTSVPVTRPALGSTTPPAHDVTSAPDNKPAPGSTAPPAHGVTSAPDTRPAPGSTAPPAHGVTSAPDNRPALGSTAPPVHNVTSASGSASGSASTLVHNGTSARATTTPASKSTPFSIPSHHSDTPTTLASHSTKTDASSTHHSTVPPLTSSNHSTSPQLSTGVSFFFLSFHISNLQFNSSLEDPSTDYYQELQRDISEMFLQIYKQGGFLGLSNIKFRPGSVVVQLTLAFREGTINVHDVETQFNQYKTEAASRYNLTISDVSVSDVPFPFSAQSGAGVPGWGIALLVLVCVLVALAIVYLIALAVCQCRRKNYGQLDIFPARDTYHPMSEYPTYHTHGRYVPPSSTDRSPYEKVSAGNGGSSLSYTNPAVAATSANL

SEQ ID NO: 60 - protein, 561 aa, homo sapiens
MVLGPEQKMSDDSVSGDHGESASLGNINPAYSNPSLSQSPGDSEEYFATYFNEKISIPEEEYSCFSFRKLWAFTGPGFLMSIAYLDPGNIESDLQSGAVAGFKLLWILLLATLVGLLLQRLAARLGVVTGLHLAEVCHRQYPKVPRVILWLMVELAIIGSDMQEVIGSAIAINLLSVGRIPLWGGVLITIADTFVFLFLDKYGLRKLEAFFGFLITIMALTFGYEYVTVKPSQSQVLKGMFVPSCSGCRTPQIEQAVGIVGAVIMPHNMYLHSALVKSRQVNRNNKQEVREANKYFFIESCIALFVSFIINVFVVSVFAEAFFGKTNEQVVEVCTNTSSPHAGLFPKDNSTLAVDIYKGGVVLGCYFGPAALYIWAVGILAAGQSSTMTGTYSGQFVMEGFLNLKWSRFARVVLTRSIAIIPTLLVAVFQDVEHLTGMNDFLNVLQSLQLPFALIPILTFTSLRPVMSDFANGLGWRIAGGILVLIICSINMYFVVVYVRDLGHVALYVVAAVVSVAYLGFVFYLGWQCLIALGMSFLDCGHTVSISKGLLTEEATRGYVK

SEQ ID NO: 61 - protein, 1752 aa, homo sapiens
MAGPRPSPWARLLLAALISVSLSGTLANRCKKAPVKSCTECVRVDKDCAYCTDEMFRDRRCNTQAELLAAGCQRESIVVMESSFQITEETQIDTTLRRSQMSPQGLRVRLRPGEERHFELEVFEPLESPVDLYILMDFSNSMSDDLDNLKKMGQNLARVLSQLTSDYTIGFGKFVDKVSVPQTDMRPEKLKEPWPNSDPPFSFKNVISLTEDVDEFRNKLQGERISGNLDAPEGGFDAILQTAVCTRDIGWRPDSTHLLVFSTESAFHYEADGANVLAGIMSRNDERCHLDTTGTYTQYRTQDYPSVPTLVRLLAKHNIIPIFAVTNYSYSYYEKLHTYFPVSSLGVLQEDSSNIVELLEEAFNRIRSNLDIRALDSPRGLRTEVTSKMFQKTRTGSFHIRRGEVGIYQVQLRALEHVDGTHVCQLPEDQKGNIHLKPSFSDGLKMDAGIICDVCTCELQKEVRSARCSFNGDFVCGQCVCSEGWSGQTCNCSTGSLSDIQPCLREGEDKPCSGRGECQCGHCVCYGEGRYEGQFCEYDNFQCPRTSGFLCNDRGRCSMGQCVCEPGWTGPSCDCPLSNATCIDSNGGICNGRGHCECGRCHCHQQSLYTDTICEINYSAIHPGLCEDLRSCVQCQAWGTGEKKGRTCEECNFKVKMVDELKRAEEVVVRCSFRDEDDDCTYSYTMEGDGAPGPNSTVLVHKKKDCPPGSFWWLIPLLLLLLPLLALLLLLCWKYCACCKACLALLPCCNRGHMVGFKEDHYMLRENLMASDHLDTPMLRSGNLKGRDVVRWKVTNNMQRPGFATHAASINPTELVPYGLSLRLARLCTENLLKPDTRECAQLRQEVEENLNEVYRQISGVHKLQQTKFRQQPNAGKKQDHTIVDTVLMAPRSAKPALLKLTEKQVEQRAFHDLKVAPGYYTLTADQDARGMVEFQEGVELVDVRVPLFIRPEDDDEKQLLVEAIDVPAGTATLGRRLVNITIIKEQARDVVSFEQPEFSVSRGDQVARIPVIRRVLDGGKSQVSYRTQDGTAQGNRDYIPVEGELLFQPGEAWKELQVKLLELQEVDSLLRGRQVRRFHVQLSNPKFGAHLGQPHSTTIIIRDPDELDRSFTSQMLSSQPPPHGDLGAPQNPNAKAAGSRKIHFNWLPPSGKPMGYRVKYWIQGDSESEAHLLDSKVPSVELTNLYPYCDYEMKVCAYGAQGEGPYSSLVSCRTHQEVPSEPGRLAFNVVSSTVTQLSWAEPAETNGEITAYEVCYGLVNDDNRPIGPMKKVLVDNPKNRMLLIENLRESQPYRYTVKARNGAGWGPEREAIINLATQPKRPMSIPIIPDIPIVDAQSGEDYDSFLMYSDDVLRSPSGSQRPSVSDDTEHLVNGRMDFAFPGSTNSLHRMTTTSAAAYGTHLSPHVPHRVLSTSSTLTRDYNSLTRSEHSHSTTLPRDYSTLTSVSSHDSRLTAGVPDTPTRLVFSALGPTSLRVSWQEPRCERPLQGYSVEYQLLNGGELHRLNIPNPAQTSVVVEDLLPNHSYVFRVRAQSQEGWGREREGVITIESQVHPQSPLCPLPGSAFTLSTPSAPGPLVFTALSPDSLQLSWERPRRPNGDIVGYLVTCEMAQGGGPATAFRVDGDSPESRLTVPGLSENVPYKFKVQARTTEGFGPEREGIITIESQDGGPFPQLGSRAGLFQHPLQSEYSSITTTHTSATEPFLVDGPTLGAQHLEAGGSLTRHVTQEFVSRTLTTSGTLSTHMDQQFFQT

SEQ ID NO: 62 - protein, 333 aa, homo sapiens
MAVRRDSVWKYCWGVLMVLCRTAISKSIVLEPIYWNSSNSKFLPGQGLVLYPQIGDKLDIICPKVDSKTVGQYEYYKVYMVDKDQADRCTIKKENTPLLNCAKPDQDIKFTIKFQEFSPNLWGLEFQKNKDYYIISTSNGSLEGLDNQEGGVCQTRAMKILMKVGQDASSAGSTRNKDPTRRPELEAGTNGRSSTTSPFVKPNPGSSTDGNSAGHSGNNILGSEVALFAGIASGCIIFIVIIITLVVLLLKYRRRHRKHSPQHTTTLSLSTLATPKRSGNNNGSEPSDIIIPLRTADSVFCPHYEKVSGDYGHPVYIVQEMPPQSPANIYYKV

SEQ ID NO: 63 - protein, 245 aa, homo sapiens
MASPSRRLQTKPVITCFKSVLLIYTFIFWITGVILLAVGIWGKVSLENYFSLLNEKATNVPFVLIATGTVIILLGTFGCFATCRASAWMLKLYAMFLTLVFLVELVAAIVGFVFRHEIKNSFKNNYEKALKQYNSTGDYRSHAVDKIQNTLHCCGVTDYRDWTDTNYYSEKGFPKSCCKLEDCTPQRDADKVNNEGCFIKVMTIIESEMGVVAGISFGVACFQLIGIFLAYCLSRAITNNQYEIV

SEQ ID NO: 64 - protein, 349 aa, homo sapiens [sequence omitted]

SEQ ID NO: 65 - protein, 702 aa, homo sapiens
MESPSAPPHRWCIPWQRLLLTASLLTFWNPPTTAKLTIESTPFNVAEGKEVLLLVHNLPQHLFGYSWYKGERVDGNRQIIGYVIGTQQATPGPAYSGREIIYPNASLLIQNIIQNDTGFYTLHVIKSDLVNEEATGQFRVYPELPKPSISSNNSKPVEDKDAVAFTCEPETQDATYLWWVNNQSLPVSPRLQLSNGNRTLTLFNVTRNDTASYKCETQNPVSARRSDSVILNVLYGPDAPTISPLNTSYRSGENLNLSCHAASNPPAQYSWFVNGTFQQSTQELFIPNITVNNSGSYTCQAHNSDTGLNRTTVTTITVYAEPPKPFITSNNSNPVEDEDAVALTCEPEIQNTTYLWWVNNQSLPVSPRLQLSNDNRTLTLLSVTRNDVGPYECGIQNELSVDHSDPVILNVLYGPDDPTISPSYTYYRPGVNLSLSCHAASNPPAQYSWLIDGNIQQHTQELFISNITEKNSGLYTCQANNSASGHSRTTVKTITVSAELPKPSISSNNSKPVEDKDAVAFTCEPEAQNTTYLWWVNGQSLPVSPRLQLSNGNRTLTLFNVTRNDARAYVCGIQNSVSANRSDPVTLDVLYGPDTPIISPPDSSYLSGANLNLSCHSASNPSPQYSWRINGIPQQHTQVLFIAKITPNNNGTYACFVSNLATGRNNSIVKSITVSASGTSPGLSAGATVGIMIGVLVGVALI

SEQ ID NO: 66 - protein, 1203 aa, homo sapiens
MDLRDFYLLAALIACLRLDSAIAQELIYTIREELPENVPIGNIPKDLNISHINAATGTSASLVYRLVSKAGDAPLVKVSSSTGEIFTTSNRIDREKLCAGASYAEENECFFELEVVILPNDFFRLIKIKIIVKDTNDNAPMFPSPVINISIPENTLINSRFPIPSATDPDTGFNGVQHYELLNGQSVFGLDIVETPEGEKWPQLIVQQNLDREQKDTYVMKIKVEDGGTPQKSSTAILQVTVSDVNDNRPVFKEGQVEVHIPENAPVGTSVIQLHATDADIGSNAEIRYIFGAQVAPATKRLFALNNTTGLITVQRSLDREETAIHKVTVLASDGSSTPARATVTINVTDVNDNPPNIDLRYIISPINGTVYLSEKDPVNTKIALITVSDKDTDVNGKVICFIEREVPFHLKAVYDNQYLLETSSLLDYEGTKEFSFKIVASDSGKPSLNQTALVRVKLEDENDNPPIFNQPVIELSVSENNRRGLYLTTISATDEDSGKNADIVYQLGPNASFFDLDRKTGVLTASRVFDREEQERFIFTVTARDNGTPPLQSQAAVIVTVLDENDNSPKFTHNHFQFFVSENLPKYSTVGVITVTDADAGENKAVTLSILNDNDNFVLDPYSGVIKSNVSFDREQQSSYTFDVKATDGGQPPRSSTAKVTINVMDVNDNSPVVISPPSNTSFKLVPLSAIPGSVVAEVFAVDVDTGMNAELKYTIVSGNNKGLFRIDPVTGNITLEEKPAPTDVGLHRLVVNISDLGYPKSLHTLVLVFLYVNDTAGNASYIYDLIRRTMETPLDRNIGDSSQPYQNEDYLTIMIAIIAGAMVVIVVIFVTVLVRCRHASRFKAAQRSKQGAEWMSPNQENKQNKKKKRKKRKSPKSSLLNFVTIEESKPDDAVHEPINGTISLPAELEEQSIGRFDWGPAPPTTFKPNSPDLAKHYKSASPQPAFHLKPDTPVSVKKHHVIQELPLDNTFVGGCDTLSKRSSTSSDHFSASECSSQGGFKTKGPLHTRQSQRRVTFHLPDGSQESCSDSGLGDHEPVGSGTLISHPLPLVQPQDEFYDQASPDKRTEADGNSDPNSDGPLGPRGLAEATEMCTQECLVLGHSDNCWMPPGLGPYQHPKSPLSTFAPQKEWVKKDKLVNGHTLTRAWKEDSNRNQFNDRKQYGSNEGHFNNGSHMTDIPLANLKSYKQAGGATESPKEHQL

SEQ ID NO: 67 - protein, 465 aa, homo sapiens
MGGAVVDEGPTGVKAPDGGWGWAVLFGCFVITGFSYAFPKAVSVFFKELIQEFGIGYSDTAWISSILLAMLYGTGPLCSVCVNRFGCRPVMLVGGLFASLGMVAASFCRSIIQVYLTTGVITGLGLALNFQPSLIMLNRYFSKRRPMANGLAAAGSPVFLCALSPLGQLLQDRYGWRGGFLILGGLLLNCCVCAALMRPLVVTAQPGSGPPRPSRRLLDLSVFRDRGFVLYAVAASVMVLGLFVPPVFVVSYAKDLGVPDTKAAFLLTILGFIDIFARPAAGFVAGLGKVRPYSVYLFSFSMFFNGLADLAGSTAGDYGGLVVFCIFFGISYGMVGALQFEVLMAIVGTHKFSSAIGLVLLMEAVAVLVGPPSGGKLLDATHVYMYVFILAGAEVLTSSLILLLGNFFCIRKKPKEPQPEVAAAEEEKLHKPPADSGVDLREVEHFLKAEPEKNGEVVHTPETSV

SEQ ID NO: 68 - protein, 314 aa, homo sapiens
MRIAVICFCLLGITCAIPVKQADSGSSEEKQLYNKYPDAVATWLNPDPSQKQNLLAPQNAVSSEETNDFKQETLPSKSNESHDHMDDMDDEDDDDHVDSQDSIDSNDSDDVDDTDDSHQSDESHHSDESDELVTDFPTDLPATEVFTPVVPTVDTYDGRGDSVVYGLRSKSKKFRRPDIQYPDATDEDITSHMESEELNGAYKAIPVAQDLNAPSDWDSRGKDSYETSQLDDQSAETHSHKQSRLYKRKANDESNEHSDVIDSQELSKVSREFHSHEFHSHEDMLVVDPKSKEEDKHLKFRISHELDSASSEVN

SEQ ID NO: 69 - protein, 702 aa, homo sapiens; identical to SEQ ID NO: 65

SEQ ID NO: 70 - protein, 581 aa, homo sapiens
METRGSRLTGGQGRVYNFLERPTGWKCFVYHFAVFLIVLVCLIFSVLSTIEQYAALATGTLFWMEIVLVVFFGTEYVVRLWSAGCRSKYVGLWGRLRFARKPISIIDLIVVVASMVVLCVGSKGQVFATSAIRGIRFLQILRMLHVDRQGGTWRLLGSVVFIHRQELITTLYIGFLGLIFSSYFVYLAEKDAVNESGRVEFGSYADALWWGVVTVTTIGYGDKVPQTWVGKTIASCFSVFAISFFALPAGILGSGFALKVQQKQRQKHFNRQIPAAASLIQTAWRCYAAENPDSSTWKIYIRKAPRSHTLLSPSPKPKKSVVVKKKKFKLDKDNGVTPGEKMLTVPHITCDPPEERRLDHFSVDGYDSSVRKSPTLLEVSMPHFMRTNSFAEDLDLEGETLLTPITHISQLREHHRATIKVIRRMQYFVAKKKFQQARKPYDVRDVIEQYSQGHLNLMVRIKELQRRLDQSIGKPSLFISVSEKSKDRGSNTIGARLNRVEDKVTQLDQRLALITDMLHQLLSLHGGSTPGSGGPPREGGAHITQPCGSGGSVDPELFLPSNTLPTYEQLTVPRRGPDEGS

SEQ ID NO: 71 - protein, 699 aa, homo sapiens [sequence omitted]

SEQ ID NO: 72 - protein, 377 aa, homo sapiens
MEPPGRRECPFPSWRFPGLLLAAMVLLLYSFSDACEEPPTFEAMELIGKPKPYYEIGERVDYKCKKGYFYIPPLATHTICDRNHTWLPVSDDACYRETCPYIRDPLNGQAVPANGTYEFGYQMHFICNEGYYLIGEEILYCELKGSVAIWSGKPPICEKVLCTPPPKIKNGKHTFSEVEVFEYLDAVTYSCDPAPGPDPFSLIGESTIYCGDNSVWSRAAPECKVVKCRFPVVENGKQISGFGKKFYYKATVMFECDKGFYLDGSDTIVCDSNSTWDPPVPKCLKVSTSSTTKSPASSASGPRPTYKPPVSNYPGYPKPEEGILDSLDVWVIAVIVIAIVVGVAVICVVPYRYLQRRKKKGTYLTDETHREVKFTSL

SEQ ID NO: 73 - protein, 619 aa, homo sapiens
MATKEKLQCLKDFHKDMVKPSPGKSPGTRPEDEAEGKPPQREKWSSKIDFVLSVAGGFVGLGNVWRFPYLCYKNGGGAFLIPYFIFLFGSGLPVFFLEIIIGQYTSEGGITCWEKICPLFSGIGYASVVIVSLLNVYYIVILAWATYYLFQSFQKELPWAHCNHSWNTPHCMEDTMRKNKSVWITISSTNFTSPVIEFWERNVLSLSPGIDHPGSLKWDLALCLLLVWLVCFFCICKGVRSTGKVVYFTATFPFAMLLVLLVRGLTLPGAGRGIKFYLYPDITRLEDPQVWIDAGTQIFFSYAICLGAMTSLGSYNKYKYNSYRDCMLLGCLNSGTSFVSGFAIFSILGFMAQEQGVDIADVAESGPGLAFIAYPKAVTMMPLPTFWSILFFIMLLLLGLDSQFVEVEGQITSLVDLYPSFLRKGYRREIFIAFVCSISYLLGLTMVTEGGMYVFQLFDYYAASGVCLLWVAFFECFVIAWIYGGDNLYDGIEDMIGYRPGPWMKYSWVITPVLCVGCFIFSLVKYVPLTYNKTYVSPTWAIGLGWSLALSSMLCVPLVIVIRLCQTEGPFLVRVKYLLTPREPNRWAVEREGATPYNSRTVMNGALVKPTHIIVETMM

SEQ ID NO: 74 - protein, 99 aa, homo sapiens
MAKVEQVLSLEPQHELKFRGPFTDVVTTNLKLGNPTDRNVCFKVKTTAPRRYCVRPNSGIIDAGASINVSGRRWTADEEDSAEQQPHFSISPNWEGRRP

SEQ ID NO: 75 - protein, 836 aa, homo sapiens
MIPFLPMFSLLLLLIVNPINANNHYDKILAHSRIRGRDQGPNVCALQQILGTKKKYFSTCKNWYKKSICGQKTTVLYECCPGYMRMEGMKGCPAVLPIDHVYGTLGIVGATTTQRYSDASKLREEIEGKGSFTYFAPSNEAWDNLDSDIRRGLESNVNVELLNALHSHMINKRMLTKDLKNGMIIPSMYNNLGLFINHYPNGVVTVNCARIIHGNQIATNGVVHVIDRVLTQIGTSIQDFIEAEDDLSSFRAAAITSDILEALGRDGHFTLFAPTNEAFEKLPRGVLERFMGDKVASEALMKYHILNTLQCSESIMGGAVFETLEGNTIEIGCDGDSITVNGIKMVNKKDIVTNNGVIHLIDQVLIPDSAKQVIELAGKQQTTFTDLVAQLGLASALRPDGEYTLLAPVNNAFSDDTLSMVQRLLKLILQNHILKVKVGLNELYNGQILETIGGKQLRVFVYRTAVCIENSCMEKGSKQGRNGAIHIFREIIKPAEKSLHEKLKQDKRFSTFLSLLEAADLKELLTQPGDWTLFVPTNDAFKGMTSEEKEILIRDKNALQNIILYHLTPGVFIGKGFEPGVTNILKTTQGSKIFLKEVNDTLLVNELKSKESDIMTTNGVIHVVDKLLYPADTPVGNDQLLEILNKLIKYIQIKFVRGSTFKEIPVTVYTTKIITKVVEPKIKVIEGSLQPIIKTEGPTLTKVKIEGEPEFRLIKEGETITEVIHGEPIIKKYTKIIDGVPVEITEKETREERIITGPEIKYTRISTGGGETEETLKKLLQEEVTKVTKFIEGGDGHLFEDEEIKRLLQGDTPVRKLQANKKVQGSRRRLREGRSQ

SEQ ID NO: 76 - protein, 430 aa, homo sapiens
MSFTTRSTFSTNYRSLGSVQAPSYGARPVSSAASVYAGAGGSGSRISVSRSTSFRGGMGSGGLATGIAGGLAGMGGIQNEKETMQSLNDRLASYLDRVRSLETENRRLESKIREHLEKKGPQVRDWSHYFKIIEDLRAQIFANTVDNARIVLQIDNARLAADDFRVKYETELAMRQSVENDIHGLRKVIDDTNITRLQLETEIEALKEELLFMKKNHEEEVKGLQAQIASSGLTVEVDAPKSQDLAKIMADIRAQYDELARKNREELDKYWSQQIEESTTVVTTQSAEVGAAETTLTELRRTVQSLEIDLDSMRNLKASLENSLREVEARYALQMEQLNGILLHLESELAQTRAEGQRQAQEYEALLNIKVKLEAEIATYRRLLEDGEDFNLGDALDSSNSMQTIQKTTTRRIVDGKVVSETNDTKVLRH

SEQ ID NO: 77 - DNA, 466 bp, homo sapiens
  misc_feature (457)..(457): n=unknown
  misc_feature (95)..(95): n=unknown
agaggaggcgaccaccgcgtggagctttacaaggtgctgagttcccttggttaccatgtggtcacctttgactacagaggttggggtgactcagtgggaacgccatctgagcggggcatgacctatgacgcactccacgtttttgactggatcaaagcaagaagtggtgacaaccccgtgtacatctggggccactctctgggcactggcgtggcgacaaatctggtgcggcgcctctgtgagcgagagacgcctccagatgcccttatattggaatctccattcactaatatccgtgaagaagctaagagccatccattttcagtgatatatcgatacttccctgggtttgactggttcttccttgattctattacaagtagtggaattaaattgcaaatgatgaaaacgtgaagcacatctcctgtcccctgctcatctgcacgctgaagacganccggtggtg

SEQ ID NO: 78 - DNA, 255 bp, homo sapiens
  misc_feature (104)..(247): n=unknown
  misc_feature (222)..(228): n=unknown
gcacatggtatggtttatctagagttacagactttgtaaggtttgcagctcagggcagttcttcaccgttggcaaaagttgaatccggcgagggctgggaattnacctgccctccactttcagctgcctttgggttagttttagttttgtctgctgntcttcgatgaccgtgtcacctgttggnttcagtcacaccagctctgaccacatgcngggatnngggctggaanntgggccctgctgaggnctcagtat

SEQ ID NO: 79 - DNA, 380 bp, homo sapiens
cctgtcccaaaatatttggcctggtcactgtagaagatgagcaggcgtggatggcatcttataaatatgtaggtgctaccactaatatccatccatatttgtccacaatgatcaactacgcccagcctgtaaagtttcaaggtttccatgtggcagaagaacgcaatattcattataacatgtcttcttttaatgaatcagtcggtcttggctacttgaagacacatgcaattgaatttgtcaattataacaaacggcaaatgagtcgcatttaccccaagggaggccgagtcgattccagtaattacatgcctcagattttctggaacgctggctgccagatggtttcactgaactatcaaaccccagatttagcgatg

SEQ ID NO: 80 - DNA, 474 bp, homo sapiens
  misc_feature (245)..(461): n=unknown
  misc_feature (40)..(260): n=unknown
tgttcacaccaagctcatttacttgtgatggtattttatagcaaacatgtttaagttgtattatcaatggttggactctgccttactggaatagtaaatttttgtggatttgtagctatttttgtttggccaaggaaatgcaatactcaagctgttaaatagaagtcagtcagacattccaagtctctctggtttcagatatcatcttgtttacacataaaggaaacaaaataaacagctttcanccagggagtttgtgtccagaantttgngagngantctttnganncttngggggttngcngcnncagtttgcatttnggagtntcatacnactgttgctggtctgcggnccatctcggcttccaatttcaccatctgctgcatctccttcgccttgcgtttgggacactgcatgacaggatttcaaaagctgctcattctgtttccccaggaattcnagatgttcaagct

SEQ ID NO: 81 - DNA, 346 bp, homo sapiens
  misc_feature (181)..(182): n=unknown
  misc_feature (348)..(405): n=unknown
  misc_feature (257)..(257): n=unknown
gcccagatatttagactcttattaatgacttctctggttttaatttctgggtctctctcacctggcacagtgcctggcttttgccatgctagctcccacttctcatgcacacaaatggtgctcagtaaatatttatgtattgagtaaaatttaataatcatttgttgaaattaaaaagtgnntaaataagttacctagaaagatgcaaagtccacaaacctggggcacttgcattttccctgagcgtaatgtttgcncatcaggatgtgaggaccagtctccctctcatgtcctgaggggtttataatcccgctcactggacagttgccgatgtcattgggagaag

SEQ ID NO: 82 - DNA, 352 bp, homo sapiens
  misc_feature (8)..(345): n=unknown
agtcaaantcagagcantcaatctgtgttgtgagccgangcacagctgcagaagcgtgtctgangtgtccngtggaggtggcagccgagctctgggactaatcaccgtgctggggacggcaccgcgtcaggatgcaggcagatccctgcagaagtgtctaaaattcacactcctcttctggagggacntcgatggtattaggatagaagcaccaggggaccccacgaacggtggcgtcgaaacagcagcccgttactttcacacgtggagggcgtnacaccaggaaaaccacaagtncngctttcacgnggggccactntacacggncncgaaatnncacaggtnagaagca

SEQ ID NO: 83 - DNA, 535 bp, homo sapiens
aaaataacctgttaattaagtgttcttagaaaggggagtgggggcaagaaagatgatgtatgcacatggcgaaaagatcagatggtacagaaaggtataaaaacttggtcccttccctcctaccctaatactcctctccaaaagtaaccagtttcaagtgtcttgtactcacaggaaaacaattttttattttttatcagcaaatttgtactttaaaaatttcacattaatagaatcagactatatatactcttctgtaccttgctttttttgctacctgtgttttatgagatctttctgtatcagtatatataaaaatacctcattatttttagcggctgtgtggtattctaatgtttgaatgtgttacaaatgttcaaacactgataggctctttaggttgtttccaatattaaatcacattgtggtgaatatacttgtacatataatgagtttttattctacagtgtacctagcaatacaattgctggatcagagggtattttttattttcagttcagtagttactgccaaa

SEQ ID NO: 84 - DNA, 402 bp, homo sapiens
agagcatctccaaggggtctcagttcccccttcagctgaggacttcggagcttgtcaggaagtggccgtagcaacttggcggagacaggctatgagtctgacgttagagtggttgcttccttagcctttcaggatggaggaatgtgggcagtttgacttcagcactgaaaacctctccacctgggccagggttgcctcagaggccaagtttccagaagcctcttacctgccgtaaaatgctcaaccctgtgtcctgggcctgggcctgctgtgactgacctacagtggactttctctctggaatggaaccttcttaggcctcctggtgcaacttaatttttttttttaatgctatcttcaaaacgttagagaaagttcttcaaaagtgcagcccagaagtgc

SEQ ID NO: 85 - DNA, 479 bp, homo sapiens
  misc_feature (334)..(334): n=unknown
ttctagtacatatacacgattgtcctcacccttcatctatagcaacgcaacagggaaaataaaaaataaggggcaacctaggcacactcagtataaaaacgcagagatccatccgaatgggaggcattggggtctggaaaccagaaatgcaggacggccagtgggcccagcagctctgggctgcacttttgaagaactttctctaacgttttgaagatagcattaaaaaaaaaaattaagttgcaccaggaggcctaagaaggttccattccagagagaaagtccactgtaggtcagtcacagcaggcccaggcccaggacacagggttgagcnttttacggcaggtaagaggcttctggaaacttggcctctgaggcaaccctggcccaggtggagaggttttcagtgctgaagtcaaactgcccacattcctccatcctgaaaggctaaggaagcaagcacttctaacgtcagactc

SEQ ID NO: 86 - DNA, 344 bp, homo sapiens
  misc_feature (139)..(139): n=unknown
  misc_feature (365)..(365): n=unknown
tgccagtttttggggatcattttgagtggaacaaagtgacctcttgcatccataacatcttaagcgggcagaggtggattgagcactatggagagattgtcatcaagaacctgcatgatgattcctgctactgcaaagtgaattttataaaggcaaaatactggagcactaatgcccatgagattgaaggcacagtgtttgacaggagtggaaaagcggttcatcggctgtttgggaaatggcatgaaagcatctactgtggcggcggctcctcttctgcctgtgtatggagagcaaatcctatgccgaaaggtacgagcaatactatagcttcacacagtttg

SEQ ID NO: 87 - DNA, 509 bp, homo sapiens
  misc_feature (211)..(212): n=unknown
  misc_feature (34)..(258): n=unknown
  misc_feature (464)..(464): n=unknown
aagaaatgtcaaggtgttctacattcatataaacaatcagggtaacatttgaaattgtaaagaaacgcactgaggaaaatatagacttaaagagttacaatgctaagctaagcacaagtgatcatcctagaggatcttttaaatatataaacacaggtttgtgccacttcagaaggcaagcacaggagaaatacactaatgttatctttcnnctttactttttcaccataagacaggatggtccagtttggaaaaaccaagatcttttctaagttccaaataggtgccgttgctcacccaagagtcatcgtcggatttcctgaaaaaccgaggctggtgctccacatgattttcttctaagacccgccgcctttctctctgcagttgttcaatcctctgcttttgtatttcagcttcttctaagttcccttcctctagaaacctctggtctggcctaaatcgangtgtcagtaggtggcaataaagactttgatgatggattccatttc

SEQ ID NO: 88 - DNA, 479 bp, homo sapiens
  misc_feature (471)..(471): n=unknown
  misc_feature (39)..(42): n=unknown
caaaaacctgagcacagttttgaagttctagccactcgagctccatgcatgtgaaacgtgtgctttacgaaggtggcagctgacagacgtgggctctgcatgccgccagcctagtagaaagttctcgttcattggcaacagcagaacctgcctctccgtgaagtcgtcagcctaaaatttgtttctctcttgaagaggattctttgaaaaggtcctgcagagaaatcagtacaggttatcccgaaaggtacaaggacgcacttgtaaagatgattaaaacgtatctttcctttatgtgacgcgtctctagtgccttactgaagaagcagtgacactcccgtcgctcggtgaggacgttcccggacagtgcctcatcactgggactggtatccctcccagggtccaccaagggctcctgcttttcagacaccccatcatcctcgcgcgtcctcacctgtctctaccaaggangtgctagc

SEQ ID NO: 89 - DNA, 474 bp, homo sapiens
  misc_feature (359)..(359): n=unknown
  misc_feature (448)..(448): n=unknown
  misc_feature (465)..(465): n=unknown
ttcagaatgtcatcattgccactaatgattactgatacacaacaagcagtttcttcaggcctgtggattggcatccaaatacagagtcttacgcagcggggacgtgggtgcgcgccccgcatgccacgaaaagcttacataagtttaacttgaacagagcttgggaaatggggctgcaaaggagagcagttcccacgccaggaaccaacgtgaaagcactggaatcagcacaacagccatggaatcaggcaggcaggggaggacgggctgtgtccttctgagctctatagtacagcaagatttcaagcagtttccagaaaaacaaacaacaacgacattttctttccttatcgacgggntattttatgggtctggaagcttcgtgttgcacatagggaaaaaaatttctctgaaacgtacaattcataggggcgaccaatgaggacangggatgaaccccgggtnctcccccag

SEQ ID NO: 90 - DNA, 455 bp, homo sapiens
  misc_feature (415)..(415): n=unknown
  misc_feature (89)..(89): n=unknown
  misc_feature (443)..(443): n=unknown
ggttcgtgctttctggcgggcgctgggagaagacggacctcacctacaggatccttcggttcccatggcagttggtgcaggagcaggtgcggcagacgatggcagaggccctaaaggtatggagcgatgtgacgccactcacctttactgaggtgcacgagggccgtgctgacatcatgatcgacttcgccaggtactggcatggggacgacctgccgtttgatgggcctgggggcatcctggcccatgccttcttccccaagactcaccgagaaggggatgtccacttcgactatgatgagacctggactatcggggatgaccagggcacagacctgctgcaggtggcagcccatgaatttggccacgtgctggggctgcagcacacaacagcagccaaggccctgatgtccgnttctacacctttcgtacccactgagtcttcagcccagatg

SEQ ID NO: 91 - DNA, 455 bp, homo sapiens
  misc_feature (5)..(354): n=unknown
accaaaattaaaggtttattatacacaagaggacgttctgtccctcagagtggctggccaccctccccactctggccaaggtcctgcacagaggtttgtcctcaagggtgacccttcttggccgcccacagctagacctccggcgaagaggcacgcagtccatgctgctggcacaagtcacttggccagctcctcagccaccgctttgcgcatcttgtccttgaggtaggcgcctttctgccattcagacttgagttccagccactcatagaatgggacgtccactatcaggaagcctgcagccactatgtgtcgccgggccagaacaaagcgacccagcaagtccttgcttcggctgttgaagttggggaactcccaccgcaagaacgctagcctcttagaccctggaggtgggtgactggctcccagttggctgggcaaagtgaggtgccaca

SEQ ID NO: 92 - DNA, 257 bp, homo sapiens
gttgggcaatatgaaatttttaaaggagtagaataccaaatgatagaaacagactgcctgaattgagaattttgatttcttaaagtgtgtttctttctaaattgctgttccttaatttgattaatttaattcatgtattatgattaaatctgaggcagatgagcttacaagtattgaaataattactaattaatcacaaatgtgaagttatgcatgatgtaaaaaatacaaacattctaattaaaggctttgcaaca

SEQ ID NO: 93 - DNA, 288 bp, homo sapiens
  misc_feature (113)..(113): n=unknown
  misc_feature (50)..(50): n=unknown
  misc_feature (204)..(277): n=unknown
  misc_feature (210)..(210): n=unknown
  misc_feature (266)..(266): n=unknown
tagtagcatacatttataatgtttgctattgacaagtcattttaactttatcacattatttgcatgttacctcctataaacttagtgcggacaagttttaatccagaattgancttttgacttaaagcagggggactttgtatagaaggtttgggggctgtggggaaggagagtcccctgaaggtctgacacgtctgcctacccattcgnggtgatcaattaaatgtaggtatgaataagttcgaagctccgtgagtgaaccatcnttataaacgtgatgatcagctg

SEQ ID NO: 94 - DNA, 462 bp, homo sapiens
  misc_feature (59)..(59): n=unknown
  misc_feature (238)..(395): n=unknown
  misc_feature (502)..(535): n=unknown
ccacactgttgcacataacagcttttatacaatgataaggacatatcatttgtttacaaagaaagtctaaaatttcaagaacattcaaagagctaacacagtaaaggtcatgcaagttctagaatagtgaatcatgacagaactcattcattttatcctttacctccaaaaggcccatctccttaacgagaagacatctcaagaccaggagcttgtcactagtctgatatttcattcaggaatattgagcctgttagcacgtactggcttgataggaagtaactcaaccctaactgtagaaaagggttttctgaagagactcactgctgcaaaatgcatgccctgtattcatattgtgttatacgatgaacatgccacatgctttcatttaagtacgtgtgcgtaacacccgaaccaggaatctcagctatgaccttttcacttagctacgctaaatgtcag

SEQ ID NO: 95 - DNA, 231 bp, homo sapiens
  misc_feature (32)..(166): n=unknown
  misc_feature (418)..(517): n=unknown
cacttttaaaaaacaaaaaaagacaagagagntganaacgtttgattattttctcagtgtatttttgtaaaaaatatataaagggggtgttaatcggtgtaaatcgctgtttggatttcctgattttataacagggcggntggttaattctcacacagtntaaaanatcagcccctaatttctccatgtttacacttcaatctgcaggcttcttaaagtgacagtatccct

SEQ ID NO: 96 - DNA, 520 bp, homo sapiens
  misc_feature (297)..(297): n=unknown
  misc_feature (45)..(45): n=unknown
  misc_feature (322)..(322): n=unknown
  misc_feature (460)..(460): n=unknown
  misc_feature (408)..(431): n=unknown
aaaagttatttacagaaggtatatatcaacaatctgacaggcagtgaacttgacatgattagctggcatgattttttcttttttttcccccaaacattgtttttgtggccttgaattttaagacaaatattctacacggcatattgcacaggatggatggcaaaaaaaagtttaaaaacaaaaacccttaacggaactgccttaaaaaggcagacgtcctagtgcctgtcatgttatattaaacatacatacacacaatctttttgcttattataatacagacttaaatgtacaaanatgttttccacttttttcaatttttaaacacaacagctataaacctgaacacatatgctatcatcatgccataagactaaaacaattatatttagcgacaagtagaaaggnttaaatagtcaaatacnagaatnaaaaacgcagtaccatagtgtcgcgaactcaaatcggcatttagatagatccagtggtttaaacggcacgtttttgcttataaaaaaag

SEQ ID NO: 97 - DNA, 552 bp, homo sapiens
  misc_feature (479)..(552): n=unknown
  misc_feature (342)..(342): n=unknown
cttgggaatgaatgtgggagaaaatcgctgctgctgagatggactccagaagaagaaactgtttctccaggcgactttgaacccattttttggcagtgttcatattattaaactagtcaaaaatgctaaaataatttgggagaaaatattttttaagtagtgttatagtttcatgtttatcttttattatgttttgtgaagttgtgtcttttcactaattacctatactatgccaatatttccttatatctatccataacatttatactacatttgtaagagaatatgcacgtgaacttaacactttataaggtaaaaatgaggtttccaagatttaataatctgatcaagttcttgttatttccaaatagaatggacttggtctgttaagggctaaggagaagaggaagataaggttaaaagttgttaatgaccaaacattctaaaagaaatgccaaaaaaaagtttattttccaagnccttcgaactatttaaggnaagccaaatcatttcctaaatggcatatcctttgtggggatttcccattaatan

SEQ ID NO: 98 - DNA, 524 bp, homo sapiens
  misc_feature (203)..(247): n=unknown
tgaaaactacaattagctttttccacaacttacaaaataataatctgatatttaaaatgaattggttttcattatgtaagtcgaaatggtaaaaaatcataatgacctatccgatgcatcatatatatgctattcagagaaactcaaatccccgaattctcctgtggcatgttttatatcagacatttaaaatctgtttaccaagaaagaccaggattttaactatatgtaggtttctgcttacagttgcaaactatcagaagcctgtctatatgatagagcccagataaacctgagatttagaaaagcaagtcatttattctcctgaggctgttttagtggcacttttgtgacaagaatgaccctcctaatgctttactacacaacttaaccagatctatcagtcatgataaattagacccagtccatctttcaatccagtctactctggttctgaacatataaacacaaaacactacagatttattaatatagcattttcccacaccctaaccctataaaga

SEQ ID NO: 99 - DNA, 175 bp, homo sapiens
  misc_feature (162)..(174): n=unknown
caaaaagtgattttctaattccatagtttcttctacatttcttaactggaattttgtaaggaagagttatccttattcatttatttacccatttacttgtaggagcatgtatcataaattcttaatctatggggtgtagttagctactgtaaatttgatgcncatanttttccng

SEQ ID NO: 100 - DNA, 63 bp, homo sapiens
  misc_feature (56)..(63): n=unknown
  misc_feature (49)..(49): n=unknown
tcattttctcctccaccagcttgtggcaaataccgcagtactttgttcttctgagnttgacgn

SEQ ID NO: 101 - DNA, 494 bp, homo sapiens
  misc_feature (384)..(384): n=unknown
  misc_feature (380)..(380): n=unknown
ccgaagcccacctgctcgacagcaaggtgccctcagtggagctcaccaacctgtacccgtattgcgactatgagatgaaggtgtgcgcctacggggctcagggcgagggaccctacagctccctggtgtcctgccgcacccaccaggaagtgcccagcgagccagggcgtctggccttcaatgtcgtctcctccacggtgacccagctgagctgggctgagccagctgagaccaacggtgagatcacagcctacgaggtctgctatggcctggtcaacgatgacaaccgacctattgggcccatgaagaaagtgctggttgacaaccctaagaaccggatgctgcttattgagaacttcgggagtcccagccctaccgctacangtgaaggcgcgcaacggggcggtgggggctgagcgggaggccatcatcacctggcacccagccaagaggccatgtcatcccatcatcctgacatccctatcgtggacgcc

SEQ ID NO: 102 - DNA, 159 bp, homo sapiens
  misc_feature (60)..(151): n=unknown
ggtgacatcagacgaagagggaaaaataaagttgctgcgcagaactgtcgtaaacgcaanttggacatatttttnantttagaagatgatgtntgtaacttacaagcaaagaaggaaactcttaagagagagcaagcacaantntaacaangctattaa

SEQ ID NO: 103 - DNA, 452 bp, homo sapiens
  misc_feature (14)..(442): n=unknown
  misc_feature (362)..(440): n=unknown
gggtccttcaagtncattncctttatatccctgcttgcatttacacttgaaggacccttgggtattgaagcaattggcatggatataaaggcaatggacttcggtgttctgctatccctgaaaattctgtgaaggaagtcctcagagcacctngtaccatcaaagacagaatcaagaagttgcttgctcacaaaaacagcatganaaagaaggcaaaaattaaaaatgttaccccagaacccaccaggactcctacccctaaggtgaacttgcagcccttcaactatgaagagatagtttccagaggcgggaactctcatggaggtaaaaaagggaatgaagagaaaatgaaagaggggcttgaggatgagaaaagagaagagaaagccctgaagaatgacatagaggagcgaanctgcgaggagatgtgtttttccctaangtgatgaagc

SEQ ID NO: 104 - DNA, 443 bp, homo sapiens
  misc_feature (53)..(439): n=unknown
  misc_feature (282)..(339): n=unknown
gcagcgctgcctttcgatctctccacatctcggtggcgcgggatctcaagatncgcctccacctgctcctgctgctcgcnctgtgcggtgcaggcaccaccgccgcggantcagttacagcttgcgtggcaactggagcatctgcaatgggaacggctcgctggagctgcccggggcggtccctggctgcgtgcacagcgccttgttccagcagggcctgatccaggattcttactacagatttaatgaccttaactacagatgggtctctttggataactggacctatagcaaagaatttaaaatcccctttgaaattagcaaatggcaaaaagtaaatttgattcttgagggagtggatacggtttcaaaaatcctggttcaatgaagtcactattggggaaacagacaatatgttcaatagntatagctttgatantaac

SEQ ID NO: 105 - DNA, 521 bp, homo sapiens
  misc_feature (337)..(441): n=unknown
  misc_feature (95)..(95): n=unknown
  misc_feature (216)..(216): n=unknown
  misc_feature (502)..(502): n=unknown
ggcagccgaccacagtttctagtgggcttcattgtttgcttcccagaccaggatgaagacactccagtttttcttccttttctgttgctggaaagcaatctgctgcaatagctgtgagctgaccaacatcaccattgcaatagagaaagaagaatgtcgtttctgcataagcatcaacaccacttggtgtgctggctactgctacaccagggatctggtgtataaggacccagccaggcccaaaatccagaaaacatgtaccttcaaggaactggtatacgaaacagtgagagtgcccggctgtgctcaccatgcagattccttgtatacatacccngtggccacccagtgtcactgtggcaagtgtgacagcgacacactgattgtactgtgcgaggcctggggcccagctactgctcctttggtgaaatgaaagantanagatcagtggacatttcagggccacatacccttgtcctgaaggaccaagatattcaaaaagtctgtgtgtgtgcaatgtg

SEQ ID NO: 106 - DNA, 492 bp, homo sapiens
  misc_feature (294)..(465): n=unknown
  misc_feature (420)..(597): n=unknown
gttgaaagaaagcacagatttgggagaacatggatggataaaatagaagattgatgtagacaggatcctagaaaacagcagtttcccctcgtcccccatggctaattctttctaaaggagctatttatttatacaaatatatttgtagacaaattaattatatttattaaattgctgaaactgctttcaaacctactttcaaatcctttgtcattccaaagaagtggatcctagggagggtagggtgagatagtttggttttttccctttatctcaaaaaggagttttgcaggngcctagtagcatgtgatcaatttgttgaagtaatgaatagaggcaggctaatttccacagcnccaaattacaatttcntgcctttgcccttaactnacangcttggtagtantagcttggaaatcttgagctctgttantccccatctgtancaaacaattcagaaagatncatcatgtctcaatactccatgtgctg

SEQ ID NO: 107 - DNA, 418 bp, homo sapiens
  misc_feature (310)..(310): n=unknown
  misc_feature (99)..(171): n=unknown
  misc_feature (296)..(330): n=unknown
aacaacccacattcccagtgcaggcatatgagggagcagaatggaccttatttacagaaaattctaatttgatctatctggtggctgccttgaagacatgctactagacacatgtttttatctctcctgactgagaacttgctttatactaagctgctcccaagggagcacggtctaaacattcttctctactgtctaaggcaatggataacaattgggggaaacaatagactagccaaaaaacttggaagcaaagtctagggaatgacatgctgtagggaataaggtctttgaaaaggtcctacatgtncttaagattttagaagaacattcacatgtccagggctgtgcacacactcaggaaaaatgcaggcaggccccagtctcttaactctggctggccataggctacacataa

SEQ ID NO: 108 - DNA, 398 bp, homo sapiens
  misc_feature (56)..(56): n=unknown
gaggaggaacacaggataaaaatggaagttctcaataaaaagaagatgtattgggaaagaaaactacaaacttttaccaaggaatggcctgtttcctcatttaaccggccctttcccaattcgccctaagactttgggggtggctctcttgtaattaatctgtgttggcaaagaatgtctggaacatggacttggcggtcagtaacctgtaacagagctacaactaggaaaattagagtggtagtagtcacttatttaagaattcattcaggtaaacagctgcaccctctgtaccccttaagtggcaaagaagctgttatagtcttctgaaaattatcactatgagtgctataattctgaatataatgtctcttaattagaattcatacaagaaccac

SEQ ID NO: 109 - DNA, 372 bp, homo sapiens
  misc_feature (264)..(364): n=unknown
agtaatgttaatgtttgagctcagtgtttgagcatgctggttttacctatttatgctaattttaaaccaacaattgaagtgagaaaataatcatttatccttgaaagtatctttagcatggtcttcctaattaaaaataccacttaaaaaagtgaggcagcaaaagcatgaactggagtcagtggtctgtctgggttaaaattggccccacgatttactacctatgacttcaagcaagttgcttaacctcgcacttcatcccanttcattatctcatttgtgnaatagaggtaaataattaacccngtactcacagggaataccgagattatgcatgtaaagtgcttacgagtgccctagcacntagtaagt

SEQ ID NO: 110 - DNA, 533 bp, homo sapiens
  misc_feature (2)..(2): n=unknown
  misc_feature (176)..(176): n=unknown
  misc_feature (258)..(258): n=unknown
  misc_feature (438)..(438): n=unknown
anaaatctttaaaaattataatttgcagaaattagttttatttctagatttctaggtggtattaatgtgatagcattaggtgggaccagagaactcatttgttttgtagctttcattatacagattatttaggaaatatatcagcaaaggattttttgttatgcttatctcttganacaaaatatttattgtacagattatacattgtgatttttttgttactgagtatattgtttgtgcccagaaaaatctaaaaanatgtgggttgacttctaagagatttaagaacaagtcacctctagtttttaagacagttcccttgatatttacctatccagtaccatctcataagaataactgcctgtaagtatcagaaagttgagaaatgctggtaatgtgacataaacttctcactgttcttcactgagataggactgncttatcttgttattgataaattatttaatttctcctgaataattagcataatctcatgtgatacagaaacatcttaattagcaaataaatttata

SEQ ID NO: 111 - DNA, 491 bp, homo sapiens
  misc_feature (375)..(484): n=unknown
ttttattggttttcctttgtataaatttatttgctaattaagatgtttctgtatcacatgagattatgctaattattcaggagaaattaaataatttatcaataacaagataagcagtcctatctcagtgaagaacagtgagaagtttatgtcacattaccagcatttctcaactttctgatacttacaggcagttattcttatgagatggtactggataggtaaatatcaagggaactgtcttaaaaactagaggtgacttgttcttaaatctcttagaagtcaacccacatctttttagatttttctgggcacaaacaatatactcagtaacaaaaaaatcacaatgtataatctgtacaataaatattttgnttcaagagataagcataacaaaaaatcctttgctgatatatttcctaaataatctgtataatgnaagctacaaaacaaatcggttctctggtcccacctaatgctatcncattaat

SEQ ID NO: 112 - DNA, 503 bp, homo sapiens
gaacagtatcttcaaggcacagcagacagtactaaacaactcaactcggtcaaacctaactttctggccagcacttgtgaaatcaaaggctccccagtaatttgattagcattttcatcattttgtaatcttataaacaccttctccagtggggaagaaatagcccaaatgggaattttaggtacctaagacttcggctgccaactgtgcctaatatcctagtaatgttaacctttccagtacccagtatagaatacccctacaactgggcattttaaacaggcaaacaagtattacacacacttaattttgttcattccagccacatgaagtcaaaggatgtttctctataagaaactacaatagatctttgaaactttgcatgaagttgttttaggggccatacttcaagtgacaggaaataacaaatagcatacacacacatttcattaagtggggtcttataaaatctctagaaccctgagaagttccttgctacttat

SEQ ID NO: 113 - DNA, 338 bp, homo sapiens
  misc_feature (71)..(71): n=unknown
tcagcaaagttctttctataaagggttagttagtaaatattttaggttttgcagaccattaggtctctgtnatggctactcagcactaccacggtagtgtgaaagcatcaatagataatatgtaaataaatgagtataattgtgttccagtaaaactatttacaaatacttaccatgggctggatttggcctgtggccatagtttgctcagtctgctctatagtattctgttacatgcatgtaccataacttagccattttattgtcagcattcaaattttttccagtaagagtatgtgcatagaaaaaaattgtgtatttcactttaaatatactat

SEQ ID NO: 114 - DNA, 436 bp, homo sapiens
aagtaagcttggtgattatatttagtggagttacttgaaataggtcatttagtttacatacagtttaattctcatgccacaattaataaggtatcacatgactgcaaaatacactgcagcaaactttctagcatctgatattggataaggatagcttgtgctagaagttggagattaatctggtctgctgactggcagcattagagactgtatctgatggttggtgtgaggatgttgttgacagttctgaaagttagccatcaattcctgtgcagggtggagtcagacccagtgacttccttttcaatgtcagcaagagttttctcatgcctgctttggtcactttctcttggaaacttcacgcatttgacttgcagcttcttgacccgaggaatcaactgagctcccagtgctggctaccttggggcaaaataaa

SEQ ID NO: 115 - DNA, 539 bp, homo sapiens
gttgtctgtctgctgcttttattgtttatttaaaatcaaatatgttttacaaatgttttttcagacaagattctgtaacatcatgtaaagcttttttgtacattcttggtgttaacctcctggcttctcttcacacacatcttctaaaaaagaaggatgtgaaagaactaggtcagtctatgactttgcaatatgtgttatatagtatgcatttatcttgtatatcagtaatttgatggttatgagagatgaatccatgagggaatggagctatcagaactctaatgttccaggtatacattctatgccccacactgagcactggggaactgggggactagagtcaaaaatataaatttgcccagactctaatgttattctattttttcttctgttgaacttaccaggctattgtaagactcttgatagttgaaactgcttatttttcctcctgtaattttaactaattgtaaaatgatgtggcattttatgttttaatgagaatgggcgattcatttaaaaaagcttgtttagaatat

SEQ ID NO: 116 - DNA, 340 bp, homo sapiens
  misc_feature (15)..(332): n=unknown
tacaaacaataggangcttaacgaaaaaataaaaggtaaaaanaaaaaagaaaaagaaaaacaagtattcttaactactgaaaagtaaacagccttttttaaaaaagacttcaacataaaaatgcgaaaangtagttgtcatctctaatccaaatacattcctagagnaaaggatcntccatggtgacagggtnacttacagctgtatncttatttaaatgctattcntattccttttnagttatttcttcnttgcaaattcaattggagatctgtgcaantctngcaaaatattcnttggattanaaaaactntataaaaaantgatcacnacctgcaa

SEQ ID NO: 117 - DNA, 289 bp, homo sapiens
  misc_feature (230)..(230): n=unknown
gttaagtgttaataatttttgtgaatttatacacacctaaacgttaagtacacaaatattttatttgttttacaaaaaaggaataagtaatttataaattaagaagttacctataaaaataaaaagataacaaccctatcatatagcttatttttaaattacctgaaaaacgatattctacactgtttcctttttgactctgagttttcaaactgttacttctcccatanttctcaatccatttcactcagttgcacagtcttttaaaccctgtaattgtcataccaaa

SEQ ID NO: 118 - DNA, 591 bp, homo sapiens
tcacatatttgaaaaacatttcaaaaccctctaataagtatttaatgaaaataaatttatcgaagagaaacaatgaccacaaaattaatactaccaaatcattactgagactttttgcattacaatatttggagagtaggtgaagaaaatatagaacagaacatgaacattttaaaatgatattccacccaagctttatctttttgctaaatcttgtggacactagaatatatattcaagatgttggtaaagatattcagcaagccatacttcaaagatgttaaaacagccctccaccaataatatggcattgcaaacccttctatcccatcccttttcagttaaaagagagaatattaacagagatttagtaatagtgaccaaaataagaaatcagtatagtcaagaaagatatgtaattattcaacatcatttggtacggatagatcaatgcaactcactaagtggacaacattgtgaggggagtgggtaacatgattcagagtcctgtgggtaaattcatatgcaataatcttattcccaatcaatctgtaaagtaaaagcactacatccacattaacattataacat

SEQ ID NO: 119 - DNA, 402 bp, homo sapiens
  misc_feature (153)..(153): n=unknown
  misc_feature (388)..(388): n=unknown
ggaagctacagtttaccttctgatccctgttatttttcagggctagtagtagaatgccaacaagaaagatcacagataaaaaataaagaaatagcctttcgtgtgttgagagctagactctaccagcagattattgagaaagacaagcgtcanaacaaagtgctagaaaactgcaggtgggaacaagagcccagtcagagcgaattcggacatataatttcacccaggatagagtcagtgaccacaggatagcatatgaagttcgtgatattaaggaatttttatgtggtgggaagggcctggatcagctaattcagagactgcttcaatcagcagatgaagaagccatgctgaacttttggatgaacaccttaaatcagcaaaatanatactaacttatta

SEQ ID NO: 120 - DNA, 143 bp, homo sapiens
ggaattcatacagcaatcaaagggctttactgtctgtacccagatgctcattgttattgaatgactcatattcttcataatttttatttaaaagttgcagtctaagtcttaactttaacatgattaacagtattatggttttt

SEQ ID NO: 121 - DNA, 444 bp, homo sapiens
  misc_feature (408)..(429): n=unknown
gcagaccaatgagtgagaaactgccccattttgaaggtgaggaaattgaggttctgggtataactttctttggtcacataatattaaattttacaatttgagccttgagcaatacacaaaaccaccacaaaattagatttatagactcaaaatgaaaacatcagcttactggtttgtagttcataccagtcatacattccaaaacatgttttgagtcttactctgtgcctgaccttgtgcttgataacagggatataatgggaagcaacactccagtggtcagatgctcacagtcttatggaggagcccaaataatatctggggaagttaaagtccatataatgactggataagagtacaatacaggtgccatggggacacgtgaccatcacttgaagactgcctggnagggccgcgcgtgtgtcatgnctatacgataaacat

SEQ ID NO: 122 - DNA, 413 bp, homo sapiens
attcttttcattctcagggcatattctactagagatgtactgtcctatgttttgaagtcacctggaagagttcttagtgtggttatatgactacatcaagagttttttacttttgatgattagggactgctttttaaaacttactttactccataatcttaaaatactcatacagttccacagtcacatttacactaacaaggcatatttgaagtccagctttcatccttgatcctgctactctaggctctcctttctcctaaagataagcattttcattatgtatcatgtttatcgtataggcatgaacacacgcgcggccccttccaggcagtcttcagtgatgtcacgtgttcccatggcaacctgtattgtactcttatcagtcattatatggacttaacttcccagat

SEQ ID NO: 123 - DNA, 447 bp, homo sapiens
  misc_feature (382)..(382): n=unknown
gaattcaacaacggtatcatggccttgtatcaagttgaaaaacaactgaacaataagaaaatttcaccagcctcgaaagacaacaacaagtttctaggatatctcaatgacaagagtgatggatacttaggtagggaaacgctaatgcaggaaaaactggcaacaacacaatttatatcaattctctttgtaggcaggtgataaaaaattcaaggacaaatctcattatgtcattgtgcatcatatataatctcttatgagcgagaatggggggaatttgtgtttttactttacacttcaattccttacacggtatttcaaacaaacagttttgctgagaggagcttttgtctctccttaagaaaatgtttataaagctganaggaaatcaaacagtaacttaaaaatgaaaacaaaacaacccacaacctagataactacagtgat

SEQ ID NO: 124 - DNA, 69 bp, homo sapiens
  misc_feature (20)..(59): n=unknown
atattcataacatttatgcnacatgaagnttctgnanggnctttgttgtntgataaganatctatttca

SEQ ID NO: 125 - DNA, 202 bp, homo sapiens
  misc_feature (195)..(195): n=unknown
cagggtagaagaatccagtcaggaccaagggaggagagtccaggaaaatgccatgagcagctctgtagcatgaccttgttgggctgggttaaagtagggtctgccaccagtcatgtgacagaaaggtacctcatgcacttcctccttcccccagaaatcagcctccaggagtgaggaatgagcccagaatgagantttagag

SEQ ID NO: 126 - DNA, 363 bp, homo sapiens
cactataatagagatagaagatacattaagaaaattcagtttgtatcaataaaacagatcaacacagaacaaggaaacaccatagatatttgtaaatgagatcttctcttttgctactgtgtatatatattcctttatatttatacaaactcacaacacatgacatttcatatttcatatgccactgagaagaggtgtcagtatacagaacataggaagaagaaaaaagcatgagaacatctgcttagttagaatctgatgaggagagacgtgagagctattgttcctctctctgctcaggcctatcgagaggcaactgcagttttgctaattgttcctcctgaggattctgctcatactgct

SEQ ID NO: 127 - DNA, 448 bp, homo sapiens
  misc_feature (411)..(435): n=unknown
ccaagctacagattcacactttctggcctaaaccctaatgggatgaggcttttcaccccaggccatgctggtggtgattttttagcccctaaataaaacactggactatttcctgtttacttcattgattgcaactacaaaggtggactcaaagcaaagcacaatcatgccagccaacattccagaattctgctgagaactccaagtctgtgaggggagaggttttacaagccagacaggcctgggggactgcagtccccaaggagaccctgccacatgctggccctttgagtgagaatgctgcatctttctacatatcttcatgagaatactgagaattggattttccttttcaaaatgcactttgctttttttgatgttttgttatgttgagatgtttctaaagaaagntttatgtaattataagatgagcgngtgaattgtacag

SEQ ID NO: 128 - DNA, 519 bp, homo sapiens
  misc_feature (512)..(512): n=unknown
acagaaaaacacaagaaaacttttatacttttatatttgggaaaaggaactggtatctcagatacaaaataatttacacataagccatacaattttattttatatagaaataggtcattattacaacagctgtacaattcactacgcttcatcttataattacataaaatcttttctttagaaacatctcaacataacaaaacatacaaaaaaagcaaagtgcattttgaaaaggaaaatccaattctcagtattctcatgaagatatgtagaaagatgcagcattctcactcaaagggccagcatgtggcagggtctccttggggactgcagtcccccaggcctgtctggcttgtaaaacctctccccctcacagacttggagttctcagcagaattctggatgttggctggcatgattgtgctttgcttttgagtccacctttgtagttgcaatccaatgaagtaaacagggaaatagtccagtgttttatttaggggctaaaaaatccnccaccag

SEQ ID NO: 129 - DNA, 416 bp, homo sapiens
  misc_feature (345)..(396): n=unknown
agacaattcccggaaggaagtccaacgaaggatctctgctcatcagccagggcctgaaggccaggaggagtcaactccgcaatcagatgttacagaggatggtgagagccctgaagatccctcagggacagagggtcagctgtccgaggaggagaaaccagatcagcagcccctgagcggagaagaggagctagagcctgaggccagtgatggttcaggctcctgggaagatgcagctttgctgacggaggccaacctgcctgctcctgctcctgcttctgcttctgcccctgtcctagagactctgggcagctctgaacctgctgggggtgctctccgacagcngcccacctgctctagtttcctgaagaaaaggggcagacttccttcacattncagcaatttcccaactgact

SEQ ID NO: 130 - DNA, 379 bp, homo sapiens
gtcaggtgggaaagtgctggaatgtgaggagtctgccccttttcttcaggaactagagcaggtggggcgctgtcggagagcacccccagcaggttcagagctgcccagagtctctaggacaggggcagaagcagaagcaggagcaggagcaggcaggttggcctccgtcagcaaagctgcatcttcccaggagcctgaaccatcactggcctcaggctctagctcctcttctccgctcaggggctgctgatctggtttctcctcctcggacagctgaccctctgtccctgagggatcttcagggctctcaccatcctctgtaacatctgattgcggagttgactcctcctggccttcaaggcctggctgatgaacagag

SEQ ID NO: 131 - DNA, 426 bp, homo sapiens
  misc_feature (37)..(396): n=unknown
tgaacctgtagactggcctgcatgaatacagggtgtncgtgaatgaaactncccacatgaactttatgtgctacnatttaactgcagccttgaacacacacaaaaatattcttaanggctcagatttagcaaacacagaagaattttaaaatgagctctcctttcaacccttgttaacaagtgcctaanaatggaagtacctgttcagattaatcaaagcaataggatttgatttgattaggtatctttttacaccagtatgttatttttaaccaaaatgtaaagttcttattaaactcattacctgccattgtgattgtcccatcatggcccacctggtttcctgatgttgtaaatnacatcaatgcatctgctgtgggtcctttgctgagatgncttcgaaggaattttgttttagccatatcc

SEQ ID NO: 132 - DNA, 227 bp, homo sapiens
  misc_feature (149)..(202): n=unknown
cagaaaagtaacatgaattgcttttataaaacattctaatattgctaagaagcaggcccattaatagacaaacagaaaagaacatgccaacgttgtctatttgtagattaataaataggcaattattttaatatacatatatgtcagcnttgaactttggaaaacagctgctttgtagtggaagtccaacttggtcaaattnctatttttaatcgaagtgaatgttg

SEQ ID NO: 133 - DNA, 515 bp, homo sapiens
  misc_feature (463)..(486): n=unknown
actgcgccgggccaattttggtttttcatggaggacttttagcaggtctcaaaagttttcttctaatagttttcttggtgttctatcattcataggtgttgaatttaccaaactttttctatttcaagtattacatttttactttgttcaagtaatattgtatcatattaaatgaacattgcattgtgaaaataccctgcttagtcatggtatgtaatcatccttatacctttttgtattctttttttaaatatttctgagaatttctgtgtctaaatttaaataggatgttgtttcgtaatcatcttgtgattcttttgtctcctttgggtattattggctaatagatgaattaagaaatgttacctcttctactgcttgaagtttttgtgagaaattgatgtttttcattaagtgttgatgaaatgtacaacttaagcagtttataacagctattctatcnaaaaagatataatttttttgtcnatggatataagtatattccaatatatata

SEQ ID NO: 134 - DNA, 391 bp, homo sapiens
  misc_feature (107)..(382): n=unknown
taaatattgataaaaatagaaggtaggggcatttgcctgcttcatacattccaaaatcaaagggcagttttactaattatttttacattcagtaactcatttgtctnacacagtaaacacaaatattacgnaacannactatattcatattcttcatcctaaaaatggnaaaaattttgagttatttattgattgtagtncngganccctncntattttntcaaattattccatgtcaagtgcctagaataattgttcatnacatactatgaaatnanaaataccgatagagatggattacaaaagtaaactgaaaaaanatcctatgaattgtttcattatatatataatagnatatacttatatccanagagcaaaaaanttatatctt

SEQ ID NO: 135 - DNA, 398 bp, homo sapiens
gaaaaacttagtcaccctgaaaacccacaaaataaataaaacttgtagatgtgggcagaaggtttgggggtggacattgtatgtgtttaaattaaaccctgtatcactgagaagctgttgtatgggtcagagaaaatgaatgcttagaagctgttcacatcttcaagagcagaagcaaaccacatgtctcagctatattattatttattttttatgcataaagtgaatcatttcttctgtattaatttccaaagggttttaccctctatttaaatgctttgaaaaacagtgcattgacaatgggttgatatttttctttaaaagaaaaatataattatgaaagccaagataatctgaagcctgttttattttaaaactttttatgttctgtggttgat

SEQ ID NO: 136 - DNA, 482 bp, homo sapiens
  misc_feature (283)..(356): n=unknown
ggcgttgctgaatactgtccactaactgtacaaaatattgactgcatgcctcgcaaacaccaaaatatccgctggaatgccatagaaataaataacttctgctataaacacatgaaaacatatcaaactgttatctctttaaacatattgtaaataaaaaaattaccagtacttctacacaataaatattaagaaaccattgacatagttgaaatgcactcatataaattaacaactttaattacattagccaaacagacattggttaaagaactgcatgtannnnnnnnnnnnnnnnnnnnnnnnnnnnnnnnnnnnnnnnnnnnnnnnnnnnnnnnnnnnnnnnnnnnnnnnnncatcaaccacagaacataaaaagttttaaaataaaacaggcttcagattatcttgggctttcataattatatttttcctttaaaggaaaatatcaacccattgtcaatgcactgtttttccaagca

SEQ ID NO: 137 - DNA, 222 bp, homo sapiens
  misc_feature (6)..(178): n=unknown
actgantccagaacactgcatagaaatnantatggaatagcttccatattggnttcttaccaatgtactgcagagataagtttagctgacctggctaccatattttttgcccagtttgttcaagaagccacttacaaggaagtaagcaaaatggtgaaagatgcattgactgcaattnagaaacccactggagatgaacagtctttcagggtgtttagaaaa

SEQ ID NO: 138 - DNA, 351 bp, homo sapiens
cgtacacctgtgcctgtgactggcggtccaagctccccacacacacatcttgctggtgcctttccctgaagtcaccacccaggggctggctgtcatcagcccattcttgtcccagcagggtaccgagggaatgataaaacagaatgtgtttgaattacacacaaaaatgttccctgcagcaggtcataaactctgtgaactaatgaagctgacaaacagagctggagtacgtttcccctcacccttcctttcctcctagctcagcaaggggtgctcaggttcaggatgttgtttgttgatcaggtcaaccaggctccgcaagaaaacttatcaggagattttatttcatga

SEQ ID NO: 139 - DNA, 428 bp, homo sapiens
  misc_feature (191)..(191): n=unknown
  misc_feature (400)..(400): n=unknown
cgccacagctgcagtcagcaccgtcctcactactgctgaggttatagctcagcaagtgtcagataaacacttggaagagggtcggctttatcctcctttgaataccattagagatgtttctctgaaaattgcagaaaagattgtgaaagatgcataccaagaaaagacagccacagtttatcctgaaccgnaaaacaaagaagcatttgtccgctcccagatgtatagtactgattatgaccagattctacctgattgttattcttggcctgaagaggtgcagaaaatacagaccaaagttgaccagtaggataatagcaaacatttctaactctattaatgaggtctttaaacctttcataattttaaaggttggaatcttttataatgattcataagnccttagataagatttactttaacagtct

SEQ ID NO: 140 - DNA, 576 bp, homo sapiens
  misc_feature (572)..(572): n=unknown
tggtcttcccattagtgtcctgtataaaaatgatgagtttctccgtagtacgtacaacagcttttaaagagaacgtaggcagaataattcagacagaaaccataaataaccagaaggcaaagtgaagcaaaattgtctcatgtgatgtttatcccaatttatatcgatattcttctatcaatttttagactgttaaagtaaaatcttaatctaagtgtcttatgaatcattataaaagattccaacctttaaaaattatgaaaggtttaaagacctcattaatagagttagaaatgtttgctattatcctactggtcaactttggtctgtattttctgcacctcttcaggccaagaataacaatcaggtagaatctggtcataatcagtactatacatctgggagcggacaaatgcttctttgttttgcggttcaggataaactgtggctgtcttttcttggtatgcatctttcacaatcttttctgcaattttcagagaaacatctctaatggtattccaaaggagggtaaagccgaccctcttccaagtggttatctgacacttgctgangcta

SEQ ID NO: 141 - DNA, 417 bp, homo sapiens
  misc_feature (71)..(71): n=unknown
gggaaagagccggtgaaggggcagaacaggcaggtgagagtctaagagggctcagtaatctgaagcttggngggaagaagggattctgggctagaaagggtgcagaagcctgaagtagaaagagacgggattttggtccggggtggagagcgaatgcattgaaaagggccaaggcccaggataaggtagacatttaaaggggtacggatgcccaaggtagagcagacacttgaggagaccagctcagcaaacggaagacacttaaagtggtaggttctcaagagagaagaagtttttaagactagagctaagcaagacatttaaaaggacatgggttgggatttggggaacacgttttattccagaggcaggaacaaaggagtcgcttgtcaaggatctggttagagaagactaggg

SEQ ID NO: 142 - DNA, 148 bp, homo sapiens
  misc_feature (27)..(124): n=unknown
tggttaatacatacagtgatggcccgnccccacgccactcgggaccagggcgcggggcggggacnaggaccggggacagatngtnacaaggcgggcggnttncgaactcaccgttgaaacatcncgcaaataaacactttgtagatag

SEQ ID NO: 143 - DNA, 394 bp, homo sapiens
taaaaactcagtctcttctagttctcagagaagggtttcatcttctaagatatccctaagaaattcttcaaaagtaacggaatcagcatctgtgatgccatcccaggatgtgagtgggtctgaagatacattcccaaataaacgacctaggctagaagataagactgtttttgacaatttttttatcaagaaagagcaaataaaaagcagtggtaatgatccaaagtatagtacaaccacagctcagaattccagcagttcatccagtcagagcaaaatggttaattgcccagtttgtcagaatgaagttctggagtctcagattaatgagcacttggactggtgccttgaaggtgacagcatcaaagtcaaaagcgaagaaagtctttggaaa

SEQ ID NO: 144 - DNA, 558 bp, homo sapiens
  misc_feature (530)..(549): n=unknown
taaagttcaaaatactatttccagataactttccactgttacatcaactaggcaactttgttatgtttatgttatatgtatcagttacttatcagcacagaattttaaccactctgctaaattttgagaaaacagctaaactcaatataaaatttggcctacagaattatagtggctatttgttactaaaaatattccaaaagaaatttacttattttactatattccatattctttaacttaaaatctgctgccactgtttagtaaaagtgggacaaataaaattctttaaaatatagaaaatacagttcctgttaagattttgcaaacaaaaaaattaataaataatacaatttgagtactctaaaacaatatactttgtagtctagattgtggttttggtcagtatgtctgacactatgaagatttacatcagttcagggaatgagttctaatactattaataaatagtcaatataaccaaacacctgacaggattccccatatggatatttttagggaagtatacnaataaaaaggttaacaggntttttaaaa

SEQ ID NO: 145 - DNA, 343 bp, homo sapiens
taatcattcattttatctgaaaatataaggaatagtatactcactgtgagaatgttcattttacatttaaaatttagtatgtatttgagcatttttctgatcatcagcttataccaagctaagaagcacagctttacataatttatttccctccttttccagcatagtttcttacttttcattgctgtagttatgatttttacaagttttttatcagaaatcttctgtgagattattcttcatatatattttttacttatttgattttatatgttcctcctctcacctcacttaaatacatgaagttttatttttagacgtcttagccactcctatgctgctt

SEQ ID NO: 146 - DNA, 368 bp, homo sapiens
gcaggatgctggcagatagcagcaacgccgtgggcccacctaccactgtccgagtgacacacaagtgttttattcttcccaatgactctatccattgtgagagagaactgtaccaatcggccagagcgtggaaggaccataaggcatacattgacaaagagattgaagctctgcaagataaaattaagaatttaagagaagtgagaggacatctgaagagaaggaagcctgaggaatgtagctgcagtaaacaaagctattacaataaagagaaaggtgtaaaaaagcaagagaaattaaagagccatcttcacccattcaaggaggctgctcaggaagtagatagcaaactgcaacttttcaaggag

SEQ ID NO: 147 - DNA, 437 bp, homo sapiens
agccatgcctttctgctaatcgattttagcaagtcgaggtaaaacacatgcaacattttctggcaaaagcttaatgtcaaacaatatgtgatccatactgtgtgtcgtccttgggggtttatttgactttgtcacaatgacagccaacagtgagactgataagcctgtaaaaataaaaaaataagactaatcaaatagacatggcattttaatctcaaagtgcaaaatcatctaactgaaaatgacggcattgaaaaattccagtggttaaaaatgaatcaaaacttcattacgcaggcagtggaagtgtgttgaaagatttaccaggggtgtcaagttttagacactcagaaaggcaccattctagccatcttgattggataacatgtatatacttatgtccctacgatattcaaaagataatactgttttagtac

SEQ ID NO: 148 - DNA, 359 bp, homo sapiens
gtcctcctcagatacccaaacaagctggatactgtgacctggacatggcaaggatatacattcattcagctttgtatgcttactttctgccagctcttcacaaaggtagaagttgagtttatgccagttcaagtaccaaatgatgaagaaaaaaatgatcctgtcctttttgccaataaagtccggaatttaatggcagaagctctgggaataccagtaacagatcatacctatgaagactgcagattgatgatttcagcaggacagctaacattgcctatggaagctgggctggtggaatttactaaaattagccgaaaattgaaattagattgggatggtgttcgtaagcatttggg

SEQ ID NO: 149 - DNA, 395 bp, homo sapiens
cctgaagagcataggacagttttagacaacaaagaattgtcctgtatctcatgacttctttgaacctcgctgaataattatgtacatagaaatcctgtttataatgagaaaggaagagcaacccctacagctgtcagctggaagctgatttagccctaatggctaggctattatattctgttgaatataaacaatgttatataacaccaacatctgacaagtccactctgagtgtggtggaggaagacaaaaattaagacactccataggcatgttggaacttagcaagattctgtgtaaatcatagagcgaccaaacattcttgtctcttggcttatatgtgtgatatttgctccattacccattagatcactctgttccttcttcctcctaga

SEQ ID NO: 150 - DNA, 468 bp, homo sapiens
  misc_feature (413)..(440): n=unknown
cttaaattaatataagcagcatctactacattcacttagaacactagatattaccacccatgatagaccatctaaatgagaaaactgcttctcttctcaaatttcatagaatgtccatgctggtttccaaagcacatggcatctaccttcagtaagcaacacagaatattagaacaccagagttcaagttcgtatctatacactcttcagctccaactaagagggcctaagggacagactgttcatcaatgactgtagactaatggttttcaccccttcaggcccacagccactttttatcagaaatatttttaaacatgttttattattctaaaacacaaacaatataacttacgtgaggcatatttttaaatcatctatcatgattaaaggtatctttaatatctaactgnaatgtnacagacnaataaaagggagcnacttacggtaatgtgtaattcaaactgg

SEQ ID NO: 151 - DNA, 241 bp, homo sapiens
  misc_feature (180)..(241): n=unknown
cactgtgccctgtgaaattggctcctttttatgtgaggtgcaaacctctgcatcccactggcctggtctgagcacctcagaagtcctgggtgctgctgaagttgccaatatttgaaattatattgttttcaaatcttcaaagtaagttgagaactcaaagccaagtttcctgaaaaccancntntggtntgatnnncanggggcctnttaaaacnacangttttccaancccttnttcccn

SEQ ID NO: 152 - DNA, 356 bp, homo sapiens
gttgccacagctggtttagggccccgaccactggggccccttgtcaggaggagacagcctcccggcccggggaggacaagtcgctgccacctttggctgccgacgtgattccctgggacggtccgtttcctgccgtcagctgccggccgagttgggtctccgtggttcaggccggctcccccttcctggtctcccttctcccgctgggccggtttatcgggaggagattgtcttccagggctagcaattggacttttgatgatgtttgacccagcggcaggaatagcaggcaacgtgatttcaaagctgggctcagcctctgtttcttctctcgtgtaatcgcaaaacccattttg

SEQ ID NO: 153 - DNA, 398 bp, homo sapiens
  misc_feature (342)..(342): n=unknown
gaaaatctgtgatttcattttattaggctaaaagggtaaataggctttattacactgaagctgcatctatatgtcactgacataaagttgaaaaaataaatgcaggcaaataactagagacttcttttaagggggtttggctggttttctctcactgaaatggccagtcgtgattaaagtgataaaaccccatatctgttttggtatattgtacacaaacctacaaaaataaactgaacttgcaatatttttgcaaaaaaatctgtcgttaaaactgaggataaaatacctgctcaattttattttactaagtatatatttacatttcaccccaggcaggcnattttcttttgtgattataagaaagagtagttgttgattaaaatttcagactaaat

SEQ ID NO: 154 - DNA, 422 bp, homo sapiens
gttaatgttgctttttaaaaatcattatttggtttgatgattcctgagtttcaaaattaaatgcacaatcatttttcgatcatgaggaacaatgagtgacaagctcttatcccaacactcttcaagttctctcattcgcattggcaaccagatgcaggcctttccagccacggtgatgaggctggctcccagtcacctcatgtgagaagcttcatgctgtggttggggcaagagcaagtggagagtccaagaagacccggggtcttgtagtcacgctgcccacttacaagcagcctgggctttgacaagctgtcgatctcctgagtcttgtgttcctactgagccatgtagggtattgtcagcaggacaatgataaacattttgtacccacttttagcaatcttctgaagaacgtttgaaac

SEQ ID NO: 155 - DNA, 426 bp, homo sapiens
  misc_feature (416)..(416): n=unknown
attatgtcatgtctggtagtttatactttaagtaatatgctatctgaacccggctatgtacattgaggcatattttaatacactcagactacaaattacaacaacatgcaataaataggacaccaacaaaaagtcagcacaaagtgaactttactgagtattataatcagctctttggaatgccagtttttcatagtgatattaagatatggttgttaaattagatcacaaaaattgcttttcttttaaatagaaaatgttatcaatcacacggatgaagaaggatttactcctctgatgtgggctgcagcacacgggcaaatagctgtggtagagttcctacttcagaatgtaaggaaaatgcctccagaaaatgtatatgtatagttaccttaagttaaagtctttagtagagnttttaatata

SEQ ID NO: 156 - DNA, 67 bp, homo sapiens
  misc_feature (15)..(15): n=unknown
aaacaatcacactgngcactttttaattcaacaataagaacaatttttttctaggggtttatagcaa

SEQ ID NO: 157 - DNA, 388 bp, homo sapiens
aagtggctgcaattacaggcaaccagcctgacttaaaacagtatcttaaggtagatggtgattagcacatgtagtatgcttaacatttaatattataataagacatcacagcggctgtctcatgattaaggctgtgttcccttgttggtgaggaaattaattatgacttgataaatagaacatgttttaagaagtggctatatagctctggataaaacgaacaaaagaattagaattcctgcggggaatatatacaagactttatttagtcaagtaaaaaaaaatcactaatgtttaactgaagaaagagaaattgaataatatagttctatttcaacatgtgggttcacagatttattctaaccttccaagtaaagttgttccacta

SEQ ID NO: 158 - DNA, 291 bp, homo sapiens
  misc_feature (173)..(283): n=unknown
tcatgttagtcatgaagttacatctcagttcataaactgcaagacatctttgagtagagatccatctcattttccgtaactacacagtgatctactaaactgattttctgtaacttaagtaacccataactttaatagcactaaacattttttccaaatttttcacaattctncaacacatttgcttatgcatctatatttctgcacttgtgctttttgagaacataactgactaggtgtagaattgtggcaaagggtaantatattcaaaatgctgacaggnaacaccac

SEQ ID NO: 159 - DNA, 438 bp, homo sapiens
  misc_feature (25)..(25): n=unknown
  misc_feature (143)..(143): n=unknown
  misc_feature (417)..(427): n=unknown
ccagggcgtgggcccggccgcgganccacactgcccggctgacccggtggtctcggaccatgtctcccgccccaagaccctcccgttgtctcctgctccccctgctcacgctcggcaccgcgctcgcctccctcggctcggcncaaagcagcagcttcagccccgaagcctggctacagcaatatggctacctgcctcccggggacctacgtacccacacacagcgctcaccccagtcactctcagcggccatcgctgccatgcagaagttttacggcttgcaagtaacaggcaaagtgatgcagacaccatgaaggccatgaggcgcccccgatgtggtgttccagacaagtttggggctgagatcaaggccaatgttcgaaggaagcgctacgccatccagggtctcaaatggcnacataatganatcactttctg

SEQ ID NO: 160 - DNA, 407 bp, homo sapiens
atttttcatagcagcatgagaacagacgaatacagcaaagaacacgttttatgaaggaaaaactttgaaaacaaagggactactttctttgatgagaggcccttcctttcactttaaacaaaacttcaaattatcctcagaatttgttctaattctccctacttctgggtaaaaattattagcagtaacagatttaacttgaatgtatatctccagttccccattctcttctctatgtagtgctgccaaactcaatagatttgaaacaaaaattacccagggaccttccccatctcccatgtccttttttcttatggcccagacctggaagtcctcctaagtgcttcctctccctcagcctaaccactctaccactatccagttgtcacaattgcaattacatattt

SEQ ID NO: 161 - DNA, 325 bp, homo sapiens
  misc_feature (292)..(323): n=unknown
ggcttcccttatctccctaatctaatcttacctcaaagcctgctgccaccattcagttattctttttacccctactcgatatacaaaataattattatttgtgatataaaagttcttttaagcccaagacagtgactaagttacatctcaaatattttctaatcaagataatcttattttcaagtacaatattcctaggcctctggtctgggtctctgtaaagacaacatagccgtcactatgtagcaaataataaaattaatgtgacttgcaatattaatcaactattagnnaanagttcatgaggcgttgtgccatttntnat

SEQ ID NO: 162 - DNA, 464 bp, homo sapiens
  misc_feature (236)..(308): n=unknown
caaattatagaagctgttctttgcataacaaatggcattgtaatgctccgattatctaaatgcaaccatccttgggtatatgcagggaattgattccagggcgctggcctgagtataccaaaatacaagcatactcaaatcttgcagtcagccccatggaaccaaagtataagaaaagtcagccttccatataggtaagttccatatcccacaaatactgcatttttgatctgtgnnnnnnnnnnnnnnnnnnnnnnnnnnnnnnnnnnnnnnnnnnnnnnnnnnnnnnnnnnnnnnnnnnnnnnnnnatcataggtttagggaattagatttgtacattcaccacaagcctgtggcatcatttaacatgtaagtctgcaattatcctctgaattttgaatgtatagatgtttgttgaggctttcaagtctacgttgacatctctttgctccaggttgtgtgca

SEQ ID NO: 163 - DNA, 398 bp, homo sapiens
  misc_feature (308)..(328): n=unknown
gtttgtttctgaagttagtttcttaagtgagttttcaggtgtctctgaaaaatttataacaatcatgtattatatgtgctgtaacatcatgtacgttacctccatctattttaggatattttcctcacctatatattatagggagaataatttagatacacatgctcagagctgagatatttctctgataaatcaggtaacaaaatgtatttgattgatggaattttgaagtaaatgtgtttttatccatcagtttctgagtaacaaagagcaccaagttttaatttaaataggagatttaacactanggatcagggagtttagtatnaagagttaaaaaaatttaaaaaacagtgtaagctgttgaaatggcaagtgaattatttaatggatgtaat

SEQ ID NO: 164 - DNA, 243 bp, homo sapiens
  misc_feature (153)..(240): n=unknown
acataacacactaatgcaaaatccagtagcacctgaaagatttaagtaaatgctgtcatcatttaaatgcttttaaatatctgtaaaagactggaggaaaaaaagataaagtacattctccagagaacaaatgtatttcaaaataaaaactgnnnnnnnnnnnnnnnnnnnnnnnnnnnnnnnnnnnnnntgtacaagattcaatagttatcacatattaacgtngtacacaagnggannaac

SEQ ID NO: 165 - DNA, 331 bp, homo sapiens
  misc_feature (264)..(323): n=unknown
ggacatttatcaggaaagcatgccatcttctcccatgattaatgaattagtagaagaaaagaagattcttaaaggacagtcagaaagcacagaggcacctgcatctggaccgcctacgggaacagccagcccccagaggagcctgctggtgatcaactttgacctggagccagagtgtccagatgccgagctccgagccactctgcagtggatagctgcctctgaactggggattcccaccatctactttaagaaatctcaggnaaacagaattnaaaagtttctagatgtcgtgcanctngntcatcggaagttctngaaantgggtgat

SEQ ID NO: 166 - DNA, 239 bp, homo sapiens
  misc_feature (237)..(237): n=unknown
caacatagataacttcatcacatggttacaatccagtatttgagctttgtaagataagtaaacatttatttgagcacaacaaaagtctacacacagtattctgggattgtttaaaaaataagtgtattctattccatttgatagcacaaagaagcacatttcagcgtgaattgatggatatattttaaaactgggcatttagttaatgtgtcaaattaagcataagaacctaaattnga

SEQ ID NO: 167 - DNA, 388 bp, homo sapiens
ccagattctgacctggagagtgtgaagacattgagttctgatgcccagcacctgcagaacagcgccctccctcccctcagcacagagagtgaaggccaccacgtgttcaaggctggtactggggcctggcaggcaaaaagctcctctgtgcccaccccacctcccatccagctcggcagcctggtgacgcaggaggccccggctcaggacagcctgggcagctggatcaactcttcccctgacagcagtgagaacctgtcggagatccccttgtcccacaaagagaggaaggagatcctgactggcaccaagtgcatctgggtgaaggccgcccggcgggctcgcgggccctgggaacgaggggcgacacctgctggcacccacgaca

SEQ ID NO: 168 - DNA, 372 bp, homo sapiens
gttttttgaatgatctctgctccctggctctatgataggaattctcaacctgagtgaacaattcaaactgagattacttgtgtttagactcatatattttgataacatatgacttctccagtatgccccagaaagctgctaataacttgctcaacctgaaatttacagttttccaaattacaggttggcagagatactggattgataacaacatccacagttatcatataatcattcttatgctgtaaacaaaattattttggttagcagaatttaataattaactgttaactacatactaggcaatattgtagccactttatgtgcttcatgacaccttatgggataggtactattatcctcattttgcag

SEQ ID NO: 169 - DNA, 468 bp, homo sapiens
  misc_feature (149)..(462): n=unknown
acaaataccatgcatttatttgcaatactgaaatgtcctctttaatcaagattttccagggcttaaaaaaatgattatccttgctattacttattaaatggtatatctaggtgccagaaaagatagaaaacatagggtaaacttatttntaaatagcatgttatttatattttcaaatcatatgcccagcatgttttcnttcaatctctagacatcttttcaggtgaaatacctctaaatttcaagcactgtgtgcaattgttaatctgagaaagatacaataaattcactntacaatgtcttaaaaattggaaacatgggggaaatagnnnnnnnnnnnnnnnnnnnnccaaaaaaaattggcagtgatcattactgagtgttgtgagccaagctctgatctcagcccatttacatacacttgcctcncttaatcctcacnagcctctagggaagacattntgctga

SEQ ID NO: 170 - DNA, 473 bp, homo sapiens
  misc_feature (363)..(363): n=unknown
  misc_feature (462)..(462): n=unknown
tgttcgaactgagtggaccattccggcagcagcacttcctagctgggctcctgctgacggagctggcactggccctcgaacctgaggctgaaggagggcccaggtcagcggtcaagactggcctcaatgcttgactcagacacagaaggcgaaggggacattgcgggtaccatcaacccctctgtggccatggccattgctggtggccccctagcccctggctcccgggccagcatctcccaggggccaccaacggcttctcgcgcaggctgtgccctctctgctgagtcaagccggaccttgctggcgtgtgtgctgtgggtgctgaaaaaacaccgagccggcgctcctgcagcgctgggncactgacctgacactcccccagctgggacgtctgttggattgctgtactttgcctggctgcctttgagtacaaaggggaaaaaggctttgaacgcatcnaaaagctcaaa

SEQ ID NO: 171 - DNA, 135 bp, homo sapiens
ctcgcccaggctttttataccttacaatgtaacttttttattttattttactctatgattattcaggaatattatctctcagataagtttagggttagatttctgatttgtaactttttactgtgttgatttctt

SEQ ID NO: 172 - DNA, 83 bp, homo sapiens
aaccctaaacttatctgagagataatattcctgaataatcatagagtaaaataaaataaaaaagttacattgtaaggtataaa

SEQ ID NO: 173 - DNA, 609 bp, homo sapiens
  misc_feature (256)..(398): n=unknown
gatagagatactatagcttccagacctgttctccctttccaaaccagtcaggctttcctctttccactctcctgcctcctcctatcccttgcttgcctggtagagatggaatgggtagcagatgttgtctcttaatggcatagcctaaggtaacttattacccacaatccttcctccaattgtagtgtgtctgaaatgtaatctccttttattgtagtgtgtctgaaatgtgatctccaagagcgactgctctgcncatccctactcgnnggcacannganggctcttnaannatggnnnnnnngntcngatctcagntctgnagtctgctaggtgtgtggccttnnnnnnnnnnnnnnnnnnnnnnnnnnnnnnnnnnnnnnnnnnnnnnnnnnnnntaataatagttcctatctcataaagttgctttgaaaattaaataagcagagtatacttagaacatgggctggcccaacccaagttatcaataaatgttaacttttataacttaacttaataagcatgattctgacagtaccatttttttaatataagagaagatgataattttagtttacctccatccccattagtgattgctttgcctcc

SEQ ID NO: 174 - DNA, 134 bp, homo sapiens
  misc_feature (21)..(125): n=unknown
cttctgctttccactgtgtcntctttcctgtccctcncaaagntctgntctcccttgactaacttcanaatctcctctctggggaggaggngggggcangagaaccagtctgngcaaagacantnccaaaccaa

SEQ ID NO: 175 - DNA, 353 bp, homo sapiens
  misc_feature (64)..(277): n=unknown
aggaaataacaaagtgaagagacaacccatagaatgtgagataatatttgcaaactatccatcnnnnnnnnnnnnnnnnnnnnnnnnnnnnnnnnnnnnnnnnnnnnnnnnnnnnnnnnnnnnnnnnnnnnnnnnnnnnnnnnnnnnnnnnnnnnnnnnnnnnnnnnnnnnnnnnnnnnnnnnnncagcttgtagggaggcatcaggaagtttccaaccatggtggaaggcaaaaggggaataagtatctcacatggcaggtgcagggcaaagnnangggggaagggaagtgccacacaaccagatcttgtgagtactcagattttgtgaggggtgcttgaggtcatggatac

SEQ ID NO: 176 - DNA, 389 bp, homo sapiens
  misc_feature (89)..(307): n=unknown
cacatcagggtaaatgggtatccatgacctcaagcacccctcacaaaatctgagtactcacaagatctggttgtgtggcacttcccttnnnnnnnnnnnnnnnnnnnnnnnnnnnnnnnnnnnnnnnnnnnnnnnnnnnnnnnnnnnnnnnnnnnnnnnnnnnnnnnnnnnnnnnnnnnnnnnnnnnnnnnnnnnnnnnnnnnnnnnnnnnnnnnnnnnnnnnnnnnnnnnnnnnnnnnnnnnnnnnnnnnnnnnnnnnnnnnnnnnnnnnnnnnnnnnnnnnnnnnnnnnnnnnnnnnnnnnnnnngatggatagtttgcaaatattatctcacattctatgggttgtctcttcactttggtatttcctctcgagccgaattccgagc

SEQ ID NO: 177 - DNA, 435 bp, homo sapiens
  misc_feature (5)..(413): n=unknown
tttgntttnccctctaaaagtgaataattccngtagttttcaggtctgctgcaaatgaaagaggggagcctggggaggctggtttacaaacttcaggaattngatcaancacacccaagctctagtccctgtagtagtaacaagatgactggctttctgtgcgttgtcaaannnnnctaagcactttacatgnaatgcctcattcntncttcacaaccaccctgtgtatttttattcctngattttacnaaaaaggnagntgnagtttcgagtggttgatactttgcngatagncatatagctaanaaggatagatcttatnnttaaacccaggcagataacgnagcctatacacttaacctcttaagaatcataattccaaattgtattnctntagtcagtntacagtagangaaatcattccagggaccgtgg

SEQ ID NO: 178 - DNA, 511 bp, homo sapiens
tttctaagcaggcacagaatgagataagtgagcactgtggctggtgggaaagggagggaaacaggtttaaagtatgtttcaaggctgcattctgagactaggagggaaaggaagaaaaactttaaaattcttctcaaggctgagatatttgactacagtctcatgcccaaaatgtttctattctacactgagacctgatagataatttggctgcatacctggagtccagtgtgtgcacctgcccctcccatcccatactcgcagccagtggaaaagtctgcaaaaggaagccagctgggagtgcccaccagagtcaaagtctggggcaggctggtggactcaagaggagtcttaaatattggaaatgtcatcacaaaccatctgggaagcccccttctcttaaaaaggacataaagtcaaagtgaacaggtgtgctcactccaagcccgtgcccacaaccacagtgccctttcacattcagagtcatggccactaagccacaaaattgtga

SEQ ID NO: 179 - DNA, 547 bp, homo sapiens
  misc_feature (161)..(161): n=unknown
gcccacccagctattgaaaaggactttctgtgggcacacactctgtttcagactgggctgggggcacacgtgctgggtgagacagtgggccctcgtcccctcccccctcccaattctctgccccaggctaatattagggactggggaggggaccaccagangggagagggaagctgcttactttgggggtagaccctgaagcccctcctccttcccccacagatggggacaggaggtgatggggtgctcagaaccctgcagctcccacttctttagccgggcagctgtttgggggacaagagagggccagggtctgtgcttctgctcccggcactggtcagggagtctgggaagagtggagaagaggcagggtcaggcctcagcatctcacatccaccacctccaggaggggagaccactggtaagtcctcctcctgctcaactcaagggactcagaccctttcttgactgagacgcatgagtgccttcttgggtgagaacagccccagggtttaagttgggcgtcctaagcagctgcaagcaagtg

SEQ ID NO: 180 - DNA, 299 bp, homo sapiens
  misc_feature (106)..(106): n=unknown
  misc_feature (267)..(267): n=unknown
cgctctagcatttgctctacgcgcgcaggagatgaaacacaagggggcctgacagacgttgctacagccccacgcagggagtgtttgtcccgcctacaggggaggngcttaggggatttctttaggaaaaaaagaaaaaaagtctggtgcttttttcttcaccattgaaaaactgtgcttgttcattaggcgtaaagagttaagaatacttgcacggaggctgggaacatttgcagaagaggagcttgagtcctgccacaggtggtngccaagggcaactgggtgccgaaggggtcctg

SEQ ID NO: 181 - DNA, 429 bp, homo sapiens
tccaggaccaaggaaagaggagcgtgccctctgagaagttaaccacagccatgaaccgcttcaaggctgccctggaggaggctaatggggagatagaaaagttcagcaatagatccaatatctgcaggtttctaacagcaagccaggacaaaatactcttcaaggacgtgaacaggaagctgagtgatgtctggaaggagctctcgctgttacttcaggttgagcaacgcatgcctgtttcacccataagccaaggagcgtcctgggcacaggaagatcagcaggatgcagacgaagacaggcgagctttccagatgctaagaagagataatgaaaaaatagaagcttcactgagacgattagaaatcaacatgaaagaaatcaaggaaactttgaggcagtatttaccaccaaaatgcatgcaggaga

SEQ ID NO: 182 - DNA, 259 bp, homo sapiens
  misc_feature (254)..(254): n=unknown
tgggcaatttgggctgggatctgcttgagtggttcttctggtcttgattggcctcattcatgtgttagctgccatgttggttgggctagtatgacttcagctaggaaagcatgtttctgcttcatgtggtctctcattctccagcatgctcactcaacatgttcatggctgggtaaggttccaacagacatttataaggcctcttgaaacctaggcttggaactggcatacagtcacttcttccacattctatngatca

SEQ ID NO: 183 - DNA, 421 bp, homo sapiens
  misc_feature (22)..(22): n=unknown
  misc_feature (366)..(366): n=unknown
atggggagagagaagctgaaantgccgactgcgacctgcagatcaccaatgcgcagacgaaagaagaatatactgatgataatgctctgattcctaagaattcttctgtaattgttagaagaattcctattggaggtgttaaatctacaagcaagacatatgttataagtcgaactgaaccagcgatggcaactacaaaagcaattgatgactcttccgcgtctatttctctggcccagcttacaaagactgccaatctggctgaagccaatgcttctgaagaagataaaattaaagcaatgatgtcgcaatctggccatgaatacgacccaatcaattacatgaagaaacctctaggtccaccanctccatcttacacgtgtttccgttgtgggtaaactggacattatattaagaattg

SEQ ID NO: 184 - DNA, 337 bp, homo sapiens
  misc_feature (4)..(4): n=unknown
  misc_feature (308)..(334): n=unknown
gttnggaagagccattccaagtaaatacaaatattctaaaatatacatcttccaagattcagcacttcttacattcatcacagtaactgtttccacagcagggaatcacaacagcatcagtcataatatccttgcagatgagacacaacaattcatctgggataggatcatcttcttctgaggaagaagatggctcctctggtaagaagggaggtttctctttcttcccaattgcatatgcttctgcatctatagttggtattgcatattttccagtgttggtaagcattgcacctttcatattaggntctttcacttccatcatgaanctncnggg

SEQ ID NO: 185 - DNA, 419 bp, homo sapiens
gttaaaaacaatggccagtcagggaggccccaagtatactctctcacagcagccttgggcacaaccagcaaaggtcagtgaccttgcggcaactgcatataagacaataaaaacaaagctgcctgtgacattgagaagtatgtccttgtacctatccaataaagataccgagttcatcttgtttaaacctgtgaggaataatattcagcaagtcttccagaagttccacgctctgttaaaggaagagttcagccctgaagacatccagatcattgcctgtccatctatggaacagctgagccttctgctgtcagtttctaaataagcaggccagccgggctgtgcaccttaaatgtctgtctgggaggagcaggctgagaagtcttgcagtctgcaggacaaccgaggaatcgtatgtg

SEQ ID NO: 186 - DNA, 490 bp, homo sapiens
tcacatttattaaaaacagcaatttctagccaaataatataaagcattttaaattatttgaaagtatatacactctttgtataagtgaacacttaaaactgtacagatttaaacaaataatcatttagcaaacaagttgggtcactattacctactcagcactttgtaaggtgtttgagtgtttcagaaataaaagatcaaaagacaagaaccaatgtcattaaatatttttataagaacacactccgctctgtaaatcaaattaaatcagtcacgtacttactgtacaataatcatgccctcatttctttggaaaggctattaaaaatcaaatgtacatataatacacaaaactggatattttacagtttatttcattaaacatgtatttaaaaaacagttaagtaaatacaatcttcctaattcattcatttcatggcaaagaatgaatatgggccctcttaccttctaccttctcaaaatagagagt

SEQ ID NO: 187 - DNA, 418 bp, homo sapiens
ggcggcggtgtctcaggcggcaatggaaggatccgagcctgtggccgcccatcagggggaagaggcgtcctgttcttcctgggggactggcagcacaaataaaaatttgcccattatgtcaacagcatctgtggaaatcgatgatgcattgtacagtcgacagaggtacgttcttggagacacagcaatgcagaagatggccaagtcccatgttttcttaagtgggatgggtggtcttggtttggaaattgcaaagaatcttgttcttgcagggattaaggcagttacaattcatgatacagaaaaatgccaagcatgggatctaggaaccaacttctttctcagtgaagatgatgttgttaataagagaaacagggctgaagctgtacttaaacatattgcagaactaaatccatac

SEQ ID NO: 188 - DNA, 415 bp, homo sapiens
ctcagtaccctgccttcttgactggtttccgttcatcagtcctgtccctcttcaagtaatctagaagaatgtggatactcttaggcgtgaatgtaaatgccttaatattgaaggtcctggttagaagcatgatacaagacatctactggattcatatttacaaatatcctggaatgttatagcttcaaagtatattagaaaaaccccaaagatggtataatctttaagtgtgcacgttcgtttatttctgcatcttccctccaaacttgcctttgcatcttaaatatttcactatgcacactcccattcctcttgggtttcatcttgtcgtttaagaaatgtactgaaataatcattggaatatttgcattttgcacaatgactggtatggatagctcttgacaaataagggaag

SEQ ID NO: 189 - DNA, 504 bp, homo sapiens
tattaaaaactggttttaggtccaaataatgaagatgtagaaaaacaacctacagtcccattataacattttgaaattcatttataaaaaatttacagcagctgtaaagtttcagtatcgtaaggacaacgtgatcctacaaacagccaaaggatgtagacaagatgtttttctgtcttccaaataacacaaactgaaaagaaaagcctttgcttttccttggccacataaaactagtatttccacactactggttaataaccccaagaaacctttgcttctcttagtcaatttgctcattatggctacaagactacagctcaacatcacaagcccagaagaaatgctggtaagacatcaatctgagcatttcccgagacccaatcacaacatttcagtgctttccttatttgtcaagagctatcataccagtcattgtgcaaaatgcaaatattccaatgattatttcagtacatttcttaaacgacaagatgaaacccaaga

SEQ ID NO: 190 - DNA, 306 bp, homo sapiens
  misc_feature (228)..(290): n=unknown
ggaactccctgctgaggctctcagggaccccagtctgcaggatgcactggaggtcgacctggccgtctctgtttcccagatctccatcgaagagaaggtgaaggaattgagccccgaggaagagaggaggaagtgggaggaaggccgtatcgactacatggggaaggacgcgtttgctcgcatccaggagaagctggaccggttcctgcagtaatccggcagctggtnggcgttgtgtgtagttagacaatgtcctgttgggtggtcctgttgcgtggagatctcctctngtcctttcaaagggaa

SEQ ID NO: 191 - DNA, 484 bp, homo sapiens
tccaaatgagatgatacaggctagaatgcacggcggaattccagactggactcactccataagccaactcatcactgcccgtgaacatgaattctggtcctcagagaagctgacattgtttccctgaacattcccgtggtctccttctgaaagccgatgaccatccaaccctgactcacctgaaatatcctacgagcctcgccctccgagactgacgattattaaccacccacacggaaaaagaaacagcccctccatcacccacatcttgtacacaaaaaaatgccaccactaatgccataaattcaggcaggttcctctatccaaaggctaaactgcttcaggtgacctaaaaagtggccacgcctctccacgtaaacacatccagctgacacaggctaggatcgagttctcccacggccttcctatcccgtctctaatttactctctgcttttccctggaatgtgcatgagaaataaacct

SEQ ID NO: 192 - DNA, 342 bp, homo sapiens
ccgcagccatggaggagatctcccatgggtctgcgcttagtgcccgccgcgagtcacacgcgccagggacctagaggagcctttggcatttgggggctgtggggaacatgaagtgagcgcgactcacggcctggagtgcaggaaaggcttctcctgcaaggcggtggcttcaaaaaccagaagtctggtagcaccacgtgcggcgtctctaaactcttggtcgtctctgacttttaaacatctagggaaagttctaaaacgtgtgtcctggcgtagtagttttggttggcacttggtgaggagggaagaatttgtaaagcactgtaacttctatagttaatc

SEQ ID NO: 193 - DNA, 479 bp, homo sapiens
  misc_feature (5)..(5): n=unknown
  misc_feature (36)..(36): n=unknown
  misc_feature (460)..(460): n=unknown
aacancctcatgcactgtcatccccattttacagtngaggaaaactgcaaagttcaacctgagaccatccgattccaaaacgtttcagggagctgcgttaaagcgagcactgagtttggaagcttcaagttctaggctcagccacgtactaagcttcaaaatgcatgggaggaggtttgtggggagtgctaccgccgggatccaagctccactggaaggattaactatagaagttacagtgctttacaaattcttccctcctcaccaagtgccaaccaaaactactacgccaggacacacgttttagaactttccctagatgtttaaaagtcagagacgaccaagagtttagagacgccgcacgtggtgctaccagacttctggtttttgaagccaccgccttgcaggagaagcctttcctgcactccaggccgtgagtcgcgctcacttcatgttcccnacagcccccaaatgccaaa

SEQ ID NO: 194 - DNA, 418 bp, homo sapiens
cccaccttaagaaattaaaaaataattctgtcccagtctgtctgaacttagtacatgatccaggatgtgatgggatcttagggcttggctggaaggtttctccagtcagccatctagcagagctgcagatctgggctgggctgttggctaaagtgctcttcacagacacctcattcggctcttccttcagcttcttcacttatttcttactcagtcactactcagctccttgtccatgtgtccttgaagccatcctaggtcttattctgattctgaattcttcagtcacccataagcttgtccttaccgggagtcagtgggtgtgtgttcccaggtggacttaaccattcttctcctttatgatcctttcccttgggtggacaagtgtgatttggttgtaaggccatttttcaagttg

SEQ ID NO: 195 - DNA, 179 bp, homo sapiens
aaatactagaagcatcacctcacaatccttgtgaccaaggagagagacttgaaacctaaggatctctatctttcctcatggttgggttctctttagagatgggtttgcagaaaggacatcataaatgttcattctgctcccagtgtagtaaattcctagcacaaagaacagatggaaag

SEQ ID NO: 196 - DNA, 357 bp, homo sapiens
  misc_feature (150)..(163): n=unknown
ccttgaaaaaatttccaacttctacctttaagatcagcctgacttatcaaacgctagagaaaaactgaatctacccttgggcagatgacttgggattggattctatacagcagtcttgctcaatcttcccagtttccagttttatgatancnccaattggttnttacaagctagaagacaatgaatgtataagttctatggaacagtgagataaatctaagcttcttgtctttgtatttagaaacattgattctatggatgatcatttgtatcatgttgaccctttgacttgtactgaaggtgattttaaatttaagtatgtagtgtttgaatttcttccatccatgtcgttttaat

SEQ ID NO: 197 - DNA, 399 bp, homo sapiens
ggggccgcggcggcgcgggtgctccgggccgaggccgcgtctggctcttgctgattgaattcctttggtgcagtttagcatgttcctctgtgttctgcatctcctgtagtgtaatgttcaagctcagaaatgccttatgtggatcgtcagaatcgcatttgtggttttctagacattgaagaaaatgaaaacagtgggaaatttcttcgaaggtacttcatactggataccagagaagatagtttcgtgtggtacatggataatccacagaacctaccttctggatcatcacgtgttggagccattaagcttacctacatttcaaaggttagcgatgctactaagctaaggcccaaaggcggagttctgttttgttatgaatgcaggaatgaggaagta

SEQ ID NO: 198 - DNA, 469 bp, homo sapiens
  misc_feature (172)..(466): n=unknown
tggtttaccagcttataaagagtacacctaagaggcagtataatatacgcactaaaaaccatttccccctttatcatctttggctagaagcctcatgaaaggaaactgaggacggcagaggcaggcaggctccgtgcgcttctgcctcacacgtcactgacaggaaggctcncatcnncnaagtcnantaggtcacnatcttntncntgagggncatttttactttgaggtcttaacngagcntgttcagtcactttggaagctggttctcttggagaganagtntggaccttgaagttccctggcttgaccttggcaagagactcgtaaaatcctcgcttctccatggtaaaggttgagaccaaagagttgctgcganaggctgtggaatgtgaggtggcggcggctgcgttggtaggncggaaagcgtgtttggattctgaaggaccggggggatgctcctcnntat

SEQ ID NO: 199 - DNA, 288 bp, homo sapiens
ctcttgtttaggtgttacagaatccaggccagacaaatctaaactttaatctcatacccagttcctagatgagtcccttctccagctcaggctcggcctaagcctcagggttccttacttggtgggcaccacctgctcccttccccgcctttgttcctctttttcctctgctggctcctccggggttgggtgtgttcagaggcagagacaggctcaaggtctttggcttttaggttctgttgatgggtgagttccagatatagctttcttttgtaggatatttcattt

SEQ ID NO: 200 - DNA, 288 bp, homo sapiens
taaatgaaatatcctacaaaagaaagctatatctggaactcacccatcaacagaacctaaaagccaaagaccttgagcctgtctctgcctctgaacacacccaaccccggaggagccagcagaggaaaaagaggaacaaaggcggggaagggagcaggtggtgcccaccaagtaaggaaccctgaggcttaggccgagcctgagctggagaagggactcatctaggaactgggtatgagattaaagtttagatttgtctggcctggattctgtaacacctaaacaaga

SEQ ID NO: 201 - DNA, 428 bp, homo sapiens
  misc_feature (215)..(286): n=unknown
tcagattcagattcaagcagactaacggatagcagtattttccgttcaagatgatggacatcttatctttataaatgattataccggtccgtctgggagaacaagatgctaaatgttacatattccttccttctttcattggaagttcattggaaattttatacacgtaccatgcatacagagaagttcgtgcatcacaaagattcaactcgatnnnnnnnnnnnnnnnnnnnnnnnnnnnnnnnnnnnnnnnnnnnnnnnnnnnnnnnnnnnnnnnnnnnnnnnnggctgcttgtgtctgttccagtcactgactcagaattttgtgatggcatggaaagcttggcttgttgtctgccggcagtgagtattgatgattttgggaacacgtttccattcacagtgccttttcagttgtaggttagttt

SEQ ID NO: 202 - DNA, 464 bp, homo sapiens
  misc_feature (14)..(463): n=unknown
gccactccgtttgnggtacttngtnacagcagccttgggaaatnaatgcagnaggacggggccanagggcatnngatcctgacgtaggnaagccacaggaccnagacctggaggtaaaggggnaggccaccttngtttcaangnaccacaaagaatntagtctggtgggaagagaggaaggcangcngcacctgnaagacnnngtcccngctgcagtanaggccatcttctgctatgcantntgctcaccanaaggctcaactctaaggagcnnaccccagtcnctagcagantgaacangaagcatganactnctcccagtnaaaactancctacaactgananggcactgtgaatngaaacgnnttcccnaantcatcantactcactgccggcanacancaagccaanctttccatnccatcacaaaattcngagtcagtgantggancngacncaagcng

SEQ ID NO: 203 - DNA, 422 bp, homo sapiens
  misc_feature (258)..(284): n=unknown
ttttttttaaaccctacagaactttgcagcacttgatcaccttttgatttttttgtgggaatgttctaagcgtggtgtacttctgacaaactgggggcaccctggggatgaatttagagtagtgcgatgggatggcaaatatccggaaagagtttctgaggagcagtttttagtttgaagaaattcaagaaatttccctttactttttaaggaagagggggtctgtctagcatgagttagcttatgttgctgcgtccnnnnnnnnnnnnnnnnnnnnnnnnnnncggtcttttgagaaagctagaaaataaattcttagtcaaagttgcccatcctgtttgccgcactttataagttattgttgctgaatgattgggagctgtccatcagcggcagagaacttgcagtttacttaagaaatt

SEQ ID NO: 204 - DNA, 349 bp, homo sapiens
tcaaagttgcccatcctgtttgccgcactttataagttattgttgctgaatgattgggagctgtccatcagcggcagagaacttgcagtttacttaagaaattgcgtgtgtgacaaaagcagctgccaggagtgtggtggtccgcgtgaatagagggagagaaggcaattagggggctgtgtggttggggctttttacttgtcaaagtggaggctcattgcttttgttaccaccatgtaaagggaatggcagggttttgttttggtattaagggccttaaagattgctgcctgacacttacacaggaaggccagataagtccagaaagagaggccacggagcagtattt

SEQ ID NO: 205 - DNA, 116 bp, homo sapiens
  misc_feature (99)..(105): n=unknown
gttcacatttagggatgtacacacacagatggcagacgtctccccactcatccagccccagatctgagccttgacgcaggccaagtggaaaaatacttnccngcncccctcccctg

SEQ ID NO: 206 - DNA, 449 bp, homo sapiens
  misc_feature (11)..(21): n=unknown
  misc_feature (447)..(447): n=unknown
acaaggcccanngaaactagnccaggaattaattgtctttggtcagttttaaatgaacaacttgctggttcattcctagaatagactgaacgtcggttacacataaagacaaaaggcttgacctcaggataagtcgaaggttaagaaaagaaatcattccatgaagcaaagaaaaaaaaatgcccgttgtcaactaactgatcagtacggctttcaataatggtgatgaacaagtaggtaaacaccacttccccttgtacaattggttatattgaagactactaactaggttactacatttcccccacactcactgtacagttaggtatttgtttttacattgatctatctactaggtgcaaagatttggtgagtggcattggctaaaatttaattgtagcctttttaaaaattacaatttcacattttaacagttactttccagcntt

SEQ ID NO: 207 - DNA, 351 bp, homo sapiens
cagggccttggccttcttattaatggacctgagggatgtgggggaaaagcagcacatctgcccctggttgctaaggtgcacacgtcccatgggagctgaaggcaggtcccctagtgtctccctgagcctgcatgggagctgctggttcttagaaagcctgtgcattttccaaggtcccagacaccagcactccctggggggccaccgtgatgtgggagttaccgagggctggagctgctcctctttctcttgccatctccatcctccaagtgctgcacgctggcatccaggttaagctgcctctcatacggggacaggacagagctgtggggtgagaacagcgggtgggcc

SEQ ID NO: 208 - DNA, 412 bp, homo sapiens
gttttgggaggacaacaatagcaaacctacagactgacaatgacctcctttggctgcacaccatctttgctgtcatttacctcctcttcactgtgggtttcatgcggcaccacactcagtccattaagtacaaagaggagaacctggtgaggcggaccctgttcatcacaggactccccagagatgccaggaaggagactgtggagagccacttccgggacgcgtatcccacgtgtgaggtggttgatgtgcagctgtgctacaacgtgggccaaactgatctacctgtgcaaggagaaaaagaagactgagaagagcctgacctattacacaaacctgcaggtgaagacaggccagcgggaccctcatcaaccccaagccctgtgggccagttttgctgctgtgaagtgct

SEQ ID NO: 209 - DNA, 477 bp, homo sapiens
  misc_feature (469)..(469): n=unknown
agtgacatgagcgtgcgctgaccccacatggggccccctgtgcaagcagagctggccggcccctccttgctggcagaggcacgggaggcctgctggggatgaggccactggccagggctatgctgcaccagaccaatggcaccgcccccacccctcccagcgcaggggcagcttggagcagaggcagcactggccaccactgcgggggcaagtcagcgtcaagagagtccctgagtgagaaggcccagataagcccaggccccccaggccagcggacaggcacaggcagggcctacagaggtgccaaggccccaggccagttgtgctaggagcctggacctgctcttccacacccccatcccgcccctactgcacaggcttgtgccttggtgccccctggaggcagcagggaggaggcttctcaggcagaagtcttaagttgcatcccattccccagagtccccagganggagaaga

SEQ ID NO: 210 - DNA, 433 bp, homo sapiens
agcccctcatctgccttcattctgaaggcagggcccggcagaggaaggatcagagggtcgcggccggagggtcccggccggtggggccaactcagagggagaggaaagggctagagacacgaagaacgcaaaccatcaaatttagaagaaaaagccctttgactttttccccctctccctccccaatggctgtgtagcaaacatccctggcgataccttggaaaggacgaagttggtctgcagtcgcaatttcgtgggttgagttcacagttgtgagtgcggggctcggagatggagccgtggtcctctaggtggaaaacgaaacggtggctctgggatttcaccgtaacaaccctcgcattgaccttcctcttccaagctagagaggtcagaggactgctccagttgatgtataaaagcactagattttcac

SEQ ID NO: 211 - DNA, 424 bp, homo sapiens
  misc_feature (254)..(270): n=unknown
agctaatgtgttacattagaatcacctcggggaggccctgggtgcccttctcagccctccctccggaggctgctgaagcccagcaaagccggagtcagagaacaatgtccgcctgagggcagggctgggctgggctggccttctggccctatctgctccgtgcccaacccagcgccccgcacagtcggagctttgtaaatacgaggtgactgtctgcctacaaactttgtaaacatcacttgaaatggccgcanggcattgcgacatggncataccactatttgtttgctattgaatttgtacttccctgccttacttttgctattgcaaaccatgctgtcactaaggtcttcatgcacacagttgtgtcttggtcagatgatatgtttctaccaattttaattgtgtttctttccacctggac

SEQ ID NO: 212 - DNA, 601 bp, homo sapiens
  misc_feature (11)..(38): n=unknown
  misc_feature (398)..(398): n=unknown
gctcagcctangggaataattgccaacaaacacttttnggaagcctgggaccatggctctgccaggaatctgtgacatctccagggcatcatttgagtcctgccttctcaaagtacttgtgacaggcagacgtgattgcagccacgaacacgatgaactcactgaagtccacctgggcatctccattggcgtccaggtccttgagcaatttatccacggcatccttgtcttttccactctagaggagagagaggctcaaggtcagcagtgagggtgcctgtgcagggcctcagcctccaccaagcactgctgctgggcaggagcagggcacccacatctgcgtcacctttgctgtcattcaggctcagggccagggccagctgtgcatagcagacacntggcattcctggccttaagaacttgtgagctgccttcagctatctggcatgacatgaactaacttgtaatgtttttagagcgaattggaattgtgctctgcgagagggagtttcattttgagtttttgccgggggttgtctttggatttgtaaagtgctttacagtgatggttgttctcaggaaatgcatccagtctttgctc

SEQ ID NO: 213 - DNA, 400 bp, homo sapiens
cttctccacaagaactaaaagacatgaaacatagcactttcatgagctagacagaaaaataggccataagattctcatggccagagccagatttcaacagtagctcctggcactgtggacacacactggaaatacagctgaggccagagatggtgtccaacctcctgaggctctcctttccttcccaaccaggacaggctgagtctcctctgctgttcctggggatacccaagatacccatcagctaaaaggcccccaagctatcactgacaacatctttaaacccagcaacaggcctgggtcccccgtgcactgctgacctctcgcgcaggctgtgcggggagacctttgtggtcggagcacaccaagcctccagcgtcctccccagtgtttagcatgg

SEQ ID NO: 214 - DNA, 435 bp, homo sapiens
  misc_feature (38)..(77): n=unknown
gagaacagtgtgagccttagtttttaggaaagcttcanggaggatgtgggactnnnnnnnnnnnnnnnnnnnnnnnntgtttgtttttaagaacaggtaaccccttttaaatttttctcctttttttaataactggggatttggatggacaaagaaaagaatggcatagggacggcatttcagcctgggggagcagcagacccagtagctcagagatagaaaagccactggcatttgcaggagtgcagaaggccaggcctgctcagagcagaaggttcactgggaaggttagtgtgtgacatggtcagagaagtcacagaggatctaggaataatcccagcagccaggcctcctgtaccaggggttaataagtatttgaggcacatttcccccattggctttcatccccattgcatccttagttcagctcagcag

SEQ ID NO: 215 - DNA, 296 bp, homo sapiens
  misc_feature (48)..(48): n=unknown
ggaaaaggcccccttaaccttcctcctcaggcccactcagcaaatgtngccactttgtggccactttgtgtaaggcattccagagatctggtgaggcacctatctacaaatatttatacacacacattcatatatggtttcagtcacaaaatggggtcattctctcccctgacctatcatttagggcattggaacatggctgcatgtggctctgtttgtgagggtccaggggatggacagggaggctctgcattattttgcttttaccaacattgcagcatgaacgtttttttaac

SEQ ID NO: 216 - DNA, 515 bp, homo sapiens
  misc_feature (507)..(507): n=unknown
gctaggattacaggtgtgaaccactgtacccagcctcttgtggccattctgactggaagctgaagtctagttttccagtgatagaaaactggaaacaaatttcttctttaccagctgagtggtaacacagtcaaccaggttgcctctggcaacaaagagttcttggttatgatggactgaaactggcagagacctcgctgctgggtgagactagccagggagcttaggggtaaggagggcaccccctgtccaacagggagattcttaggtcagggagcacctggctggcttcctcactcaccgccgaagtgggcattggatttgacctattacgaacctggagcaggaccagggatgccctggttgctctgcagaatgtggctcagaggtaagtgatctgttcgggatacccagtcactgtgctcagagccatgcctccctgggcagccggaggaacatggatgtgctctggaatgtctttaacacctttttttgttagttccagancccctgag

SEQ ID NO: 217 - DNA, 439 bp, homo sapiens
  misc_feature (123)..(123): n=unknown
  misc_feature (387)..(387): n=unknown
atgtgcttttggaaatagtgttttcctcaagtatctgcttttgtgcagcacttgggtttaaacaaacaacaaatttcgataccaacttcttgggcttcaagctattgagcacttatagccacnactatcaagtatagttatgatacagacagtccaaatttatggaaaatattacaaagacaaatgccttgaaaagatgacacagtgcagggaaaactacagctattaagctggtataaaaacttagtcaaaatgttttagtccattatggctctgcctaaagcttcaaaggaagaaaatttaagacacttctcatccaaggcacttaaaagagttgcaataaagtacttctttgaatttagtttgagcccaacagtattttttatncctttttcacattctgactcacactgaaacagtccttgaaggcagctattaa

SEQ ID NO: 218 - DNA, 393 bp, homo sapiens
  misc_feature (378)..(378): n=unknown
cgagcgcatgcctctctctgatcacaggtagcactcagattaccctgcctgctctgtgctttgctgcagaccatttgaccagaacgtgtgcagctcagccagccacagaactggaatttttcaggagcagggggagcatggagtttggactttgctgagcaactgaagtggagcgcagagcttgctcgcttaggagagagcatcatggatggcaaacaagggggcatggatgggagcaagcccgcggggccaagggactttcctggcatcaggcttctttcaaacccattgatgggcgatgctgtgtctgattggtctcctatgcatgaagctgcaatccacggacatcagctgtctctgaggaacctcatcagccangggtgggctgtgaac

SEQ ID NO: 219 - DNA, 540 bp, homo sapiens
  misc_feature (485)..(485): n=unknown
gcagagatggaaccaggacagtgatgctggaaaagcctgcctcgatcaagtcatcacataagttaatgtcagaaaacctgtatttgaatttgactcctctatccttactctggaaaattggacatcttgacccagtggctgtgagggctaaattagatgatgcagaaagtgcttggcatgcagtagatatgcaaaacaataacttatgacactctccatgcagggaaaaaagtcttcatgccttctaactaataatacaaacgtatgcagtgtctttcaaccctggcttgagtttaacaaatacaaattgaatagaaaaaattagtcaaactccataaacaagtttataacaaatacaaatctaatcgaaaaaactagtcaaactctataaatccaacttgattttaaaattctagtggctacaacactcaataatgttttcacatcgtttgtgaatccattccctagatgcatttaaagatgtnggagaaactgtttcagatcctccggggaggacgagttgggtatcttatgatgctg

SEQ ID NO: 220 - DNA, 475 bp, homo sapiens
gagaaattatcattcccttcctgcaccccctgtcagttcccattttgacagcattttgttattgtcattgatgacattattaatatagaagcaggaaaaaagctcaaatagatttctttcatcctctagtctggtctgaaagttcaaataccttcttttgccaacggtagtcaggtgatgccaccaagcaaagagacccctgagcagccctgagacttccggatatttcctgcacctgcggtattggagaagatgctgtgaatatccagataggcttctctccaaagagtcagagctgaaaataccagggaagtggtttttggatccttcctgggggatcctgccagggacatggcctggctcaagctctagcaggggaagtctggtatcaagtctcacctggcaggaattgagcccagaatggaatatgctacaggcagagcagccctcccatctcttcctcagccgacctgag

SEQ ID NO: 221 - DNA, 460 bp, homo sapiens
  misc_feature (237)..(237): n=unknown
atctatttgattaagagaaacagaggagataggaaatgtaaagccactgactatttttgttggtatctaggcaaaagctgtgcctcacttctgcgggttgaaccctttgtatgtgcccagtgccgccacagatttcacccctcactggaagcaagaaaagaatggtaagattctatgtgagcagtgtatgacctccaaccagaaaaaggctctaaaagctgaacacaccaaccggcngaaaaatgcatttgtgaaagccctacagcaggaacaggtaagaattctgactgctcactggccacctgtcccagtttgttttttccaaagggtcgcgccttctagtttgcaggagtggttcatgtgatccctacagtccacaggttccctttttgtctccttatcattgtgtctaattccatttgagcgagtattctgattaaggaacatggtaaaatatatg

SEQ ID NO: 222 - DNA, 336 bp, homo sapiens
  misc_feature (3)..(328): n=unknown
canagcataaatngngttttnnttttnactcccgcctacccgatcttccaaaaagtccatnatgctactcanacaagggantctgatgggtggngtgggaaataggnntaaaaggatctgagttncccancacatttttccttctcgaagatattctcatcctataacngctacatgagttgtncacatactctagaaccantactcttcactgggctacttcataattcactctttctttcgtcatttcntatcaaaaacgcactgcaaataactgtttcaaaganatttatagcacnaatatnaattcctcccancaanatctatnatttgttt

SEQ ID NO: 223 - DNA, 457 bp, homo sapiens
  misc_feature (87)..(87): n=unknown
  misc_feature (105)..(105): n=unknown
  misc_feature (386)..(386): n=unknown
gaaaagtttatttctctccactcccaatgacaccaagacattgtgcatggtgttaatgttaattgcattccacagaaaacatgcttncattgagttcaagggganaaaatacattcattatgttacagtttacataaggaagaaaggtaagattcccaacccccacctttcgttccccaccactaccacagacaaaacatggttttgcttttaaatctcaagacataacatagggtctaagcctgtctactgctacgatgtaaaactaacatcatttttcccctttgcttcttacagatttttgcatatatgaatgaaacctcttcccgaaaggaaaaatgggactccaagctcttaggtttttatcaattaattcaataattganccttgggtcttttggccatccttaggccctccctgttctgagactaatgcgttcagtcctctgttgtcgga

SEQ ID NO: 224 - DNA, 304 bp, homo sapiens
  misc_feature (293)..(300): n=unknown
gatgagtttacacagtaactatgattaaacagtgcaaattcactgaaatattttgatgctgagtttacatttacatgccaaacatttagaaatatattaagatatgactcactgctacatggtttcccatataagatgagtcaaaccatgttccctaaataaaatatagacagatgaattttggtacaacacagtcatcttataaaatctattttactcatggccccaatatcaactttaaaagggttccagtatatctgaagaatgaaccagatttttcagtttttaagccnaccnngnggct

SEQ ID NO: 225 - DNA, 480 bp, homo sapiens
  misc_feature (48)..(48): n=unknown
  misc_feature (261)..(261): n=unknown
  misc_feature (420)..(420): n=unknown
ctgggataagcaaagtttaaacatctttgtgtttgtttatagtaaganttctctgtatatttaaagtaaaatgtcactttgtaagacagtggatagtaagcagtattttcatgtttgaccactgaaaattttttttcactagacatcactgtttgtgatacccaagtttgggaaatgtactaaacttaaatacatgaagatactttgaagataaaacactgtataaatatataattagagaaaagatccagttgctgaaanttatttcttcttaagtgggaacaatttatagagttaataaagaataattttatagtgattgtaacaagacagtgccatgttaatttaactagtacagtaccgtaatttaaaactgtgttacttcttaacatgttccatgttaagatgccccaaaaatgntaatggattcttccatcctctatatactatttctaagtccttgtgtggtgtattctatac

SEQ ID NO: 226 - DNA, 442 bp, homo sapiens
  misc_feature (56)..(392): n=unknown
tctttcaatcaaagtaattaaggtattacatctcctctggagctcctaaattatananaaacatggtanacgcactttccatccanaagtttcatgatttcaantttaaaacaaggtatgttttaataggataatatataaaaccactaatacacccctgatttaaaaaaaaaacaactgattttcatatacaattcatgctatgaagattaaaggcaagatntttgtaaataatgtttttacnccaatctttaaagccaaactactgtgtattcttcaaaaattcttccttcacttaggnnttaaagcaataaaaatgaacatatgcaatactgctacttagtgngtatgtctgagnactactgtgctacttatatccaaaacttaaaaangattaatagtgcacatatgtgagggtcaaaaacaacaagaacttttacag

SEQ ID NO: 227 - DNA, 417 bp, homo sapiens
  misc_feature (48)..(48): n=unknown
atctaattccattagggttcacgtcttttctttctgggacactatccnactatatccatatctatagatttcaatatagatgattgtgccatcttctgtagcccctccgctctactcattccttccaccatctgcagagatttgaagtttggggctatgcatgaaacccaacactaaattttgcaagtcaagtaaccaaaaaagggggaggcattttgaagatagaacctctattttaaaaagagaagttcaactcataaacgtgattgataggtggctgatttatttaggttttgtcaagctatctatcaaagtaatggtacagttacccatctactcaaatatctgatttatctcaccatccaattatctacccacctgtcttcctctctagcaatctatttactggttatcaat

SEQ ID NO: 228 - DNA, 467 bp, homo sapiens
  misc_feature (3)..(3): n=unknown
ganaaggttttccaactgaggcagggcaggtctgcgattgatgctgcattctcatcctctctgtggatcagtccctgcagcacacctgtgcggtctgcaatgcctttattttgaatcccaggcaactttgctggatgagtccttctcgtcccaggagacaagacagcaaaggtggctcagctcttgtttgtatgctgggtctgctttgaacctgaagagctggtgaagttcttccccaaagccattggagaagcagctgcatcagaggaaactgtgtcactgacactttctcccttctgtttgcagtgttgtgttaatcaagtgcttgaaaattaagtcagttgctcaagtgccctcagcttagaagagcttcctgaaacaaataccagagttgtcaatacacccgccatgtaattggcctccatcagctttttactggatagttttcaaacagattaaaccagaac

SEQ ID NO: 229 - DNA, 532 bp, homo sapiens
  misc_feature (48)..(48): n=unknown
aaaatacgtaaatacataaaatagttacaactgtcaatcttctgggtnttttttaaccacaataaagacaaattgaactagttactagacaatgacaacttgcagcttttcgaagccaagccaaattgcttcaaagtcttggaagcattgcgagaacatagctgtttaagtaggatggttaagagtacaagatctgaattcagacttcctagattcacctccaagccaattttctcccttggaccatagggaagtcattacatctttctaaaatgcagtttcctcctgtgtaaaatttgaagcggtgcctacctcctacggtctttgtaaggatcgaacatctaacagggcgtctgctaatctaataatatgccattcaataaaagttgaccagggagcgttattactagtttaaaatgtgaccaatagtcgcatcgcaggttttgaagagtgggaagagggcattttggcatggaggccattgcaggcgtcagagacgcgggatcgaacccctgtgctgtcaccaggtgcg

SEQ ID NO: 230 - DNA, 515 bp, homo sapiens
  misc_feature (47)..(47): n=unknown
gctctacaagatggcggcggtcggggccgaggcgcgaggagcttggngtgtgccttgcctagtttcacttgatactcttcaggaattatgtagaaaagaaaagctcacatgtaaatcgattggaatcaccaaaaggaatctaaacaattatgaggtggaatacttgtgtgactacaaggtagtaaaggatatggaatattatcttgtaaaatggaaaggatggccagattctacaaatacttgggaacctttgcaaaatctgaagtgcccgttactgcttcagcaattctctaatgacaagcataattatttatctcaggtaaagaaaggcaaagcaataactccaaaagacaataacaaaactttgaaacctgccattgctgagtacattgtgaagaaggctaaacaaaggatagctctgcagagatggcaagatgaactcaacagaagaaagaatcataaaggaatgatatttgttgaaaatactgttgattttagagggcccaccttcagac

SEQ ID NO: 231 - DNA, 388 bp, homo sapiens
  misc_feature (10)..(382): n=unknown
tgccaatgtntnaatngnnaagnagaaaacagtataaaattcagtatcancnatttgtctcaaatacaagtacantgagtattaaacaggnatgacaatagagtagcaaaaacagaactgtagatttgcccaaattaantgtttcnccgaatttnaggtgtatggcaanttgaatcttggatctctcagcagttgttaattacattatcagctgaacgctttcaaacactacgggaggcattnctctgttcanntagacttaagnacacatatactaagcngtaaanaggctgccttccattagtttggtctctaagcactananatatgtcgncttcatatnagtctatgagacncagtgacncccttttcagaggnatcngtaata

SEQ ID NO: 232 - DNA, 510 bp, homo sapiens
  misc_feature (49)..(49): n=unknown
accaggtgcctttagcggttactaagataactgacatcagttgtttctntgaaataagtgttgctgtgggaataattttaatgttcaaggtgatatcatgggggagttttgtcttttaaaacattagaagcattttaaatattaagaatcaaatatttatagatcaaaacttgtgttttaagtattatacgggacctgtttacttatagtaaatgtgaatgtacacatgagttgttgctgaagctgacaagcatattacatacatgcattttccctgtgccctcatagttgcagttagagttccagtacctgtaggctcacctgggaggcagattagacccaaaggtagatgtttttcccctttccatgaagcatgtcagtgggagttgcttcctttgatttccctagtactaaattttaaggcttttgtaaaaaccaaaccaaaactaggagcttggaacagttaaaaatcaacactgctaccatccaattcatcaaatatttacctag

SEQ ID NO: 233 - DNA, 492 bp, homo sapiens
  misc_feature (169)..(481): n=unknown
taaatattacagtgactattacaagcatttttctataaacaaaggtgtagtttacagatttgtgcaaagtgggaaaatattttcatcagtagtctttcttccatggtgttggattcacccctgaatatgatctgaactctttcagagaggcagtccttcatctaaatgncagttggtggcaaaatgttatantcgaatctggattattctgatacagtgtcactttagaaagtagcttagtttcatttctgattgatcccctttgttagantnagaaatttnttgaanaacaatcttntgtatntaatgacctttataatannaaaaaccctgtcctgtgtttctcattggcattaacctcngtctacaccctctaattctctaattatggcaccagtgggtatagaaagtgaattatggttatttggctcatgcagcaaattaattggagaanctggaccgcaaatattctgtgaagaantacaaggtctt

SEQ ID NO: 234 - DNA, 537 bp, homo sapiens
  misc_feature (160)..(160): n=unknown
  misc_feature (484)..(484): n=unknown
gtttgaactcttaaaaaagagttcctcaaactcttttttaagaatatacagtgaaatgtcttaaataatattatctaaataatacctaaagaatgcaaatgacttgcaatgctgaatagtcagacacaggatgttccatgctaagggtagactcatattntccactttataaaatgtggtttcagaaaacaaatagatgtgtttcttccttaataattagtgtttcaggaccaaagttgactaaatatggaagtttaagataaaacccggtttcttagggaatctttctcagtccttagtaattctgtagaattgatgatagagtggcaacttcaatacactcagtattcttttctgtttgaagtctgttttgccattggaaaaaacttattgttgtttgaatttgggtatatgtatcacagatggtttactttatttttattttgtttaaacaaatactttccggtcccaaacactgagacangtttcatgtcctaaacactttataaatattagaatatttaaatccccttaact

SEQ ID NO: 235 - DNA, 475 bp, homo sapiens
  misc_feature (23)..(453): n=unknown
ggctacagacgaaaaatatccantatanacanacattacttagataccagtggcatcttaaagcagcacacccanntctcaaaatgcaaaagggnnaaattttccactcccacgatnccangcnnaactccctngtaaagcacttgtcaggtaaaagatagtgacattgcctctgttactgtggaanttggagaggaggtgtgngtgtgaagcacatcagtaattctctctcttcattttttcatcctctttttttcccctcaatttatctcttcttttccacaatgtctctcctttctccatangcccacttcgagctgctctcncatccccaattccaacaanaaagacagctttgncctttaattctgttgtttaanatcaatctcnaaattttanacaacanacattcntanacactactggntcatattttcanaagaatatncnannggcacagagggggttgaaatgg

SEQ ID NO: 236 - DNA, 546 bp, homo sapiens
  misc_feature (475)..(475): n=unknown
acgtcatgcaaattgtcatcaaggctgtaaatttcacaagggcccaggaattgaatcatcgctagtttcaggaattccttaaaagtatggatgctgactctagcaagtcattcactttttagaagtaagatggttaagtcaaggcaaaatgtaaagattttatgctttgtgatgtgaaatcaagctgtttatggtatcaaacaaaattggtgccagaacttgacaatgaaaactggcttacagatttagcatttttagtgggtttgacggcccatttaagtgagttaaacctgtgtcttcaagttgaaaaccaacttaacaatacaatgtttcaaaccataacagcattccatatgaaactgaaattatggcaagctcaaattaaggcaaacaattttatgcatttcgacatgttggctaaacatggtcctgtgaacagccaaaaatacgcagccttgcttctcaatttgatacnggatttgaaaacaggtatttcaagatttctgaaaaatctcaatattttggtatatttgcaactccttttcg

SEQ ID NO: 237 - DNA, 333 bp, homo sapiens
  misc_feature (127)..(127): n=unknown
  misc_feature (301)..(333): n=unknown
acataaaactagtggggtacttgacattgtttttgagaaactaatccatcagtatctggcttgatggaagtagttgcaattctcagtgagttctcaaggtgctcatcagatattttggttctaattntactcttcgtgttcttcatccttgaaaatagtagctcacaaatgtaagtgctgccaaaaagcaatgacatgaacaaggtgtgattgtgaagcaagggatatttgtcattgggaagacaggtcttacaaaagtccagtaaagaggcaaaatcaaatttttctataagttgaacancagattgcagctncaggcatnccattnaaaan

SEQ ID NO: 238 - DNA, 557 bp, homo sapiens
gggctggggttgagctctagatgagggactttcctgctcctgcaagggtgagcactgtatacacagacaaggagggtgcagtagagtgactcccttggaaggaagtagtaccatcagaacctactattattatgacataaattctatttacatacattgagagaatactacaatcaacactttttcctgggatgactttaagaggtttgagccacagcacctgaagtggcaaagatccatggtctttgtagggtattagagaactcttccagtcacctctgaaagcactctagatcttgcagctgagtggatgaagtgtaacaaatctgttgcacgctgagaggagtcagaattagcatttttcatgaaagttccccacgtctctactaagaatgaggaagaaaagactaagactaggtaattaccacagaggcttgaaatgttacatcaccagagccaagtcctctcccttcagatcagttactggctgctacacagggacacccccaccttttcagggcatcccatgcactccactttctcaggatctaaggaat

SEQ ID NO: 239 - DNA, 457 bp, homo sapiens
  misc_feature (297)..(444): n=unknown
tagaaatgaatgtacaatgtatgtctgattcacaccaggggaagtggcacagtgccctttctgggatccctacaaagtcaaattccttagatcctgagaagtggagtgcatgggatgccctgaaaaggtgggggtgtccctgtgtagcagccagtaactgatctgaagggagaggacttggctctggtgatgtaacatttcaagcctctgtgtaattacctagtcttagtcttttcttcctcattcttagtagagacgtggggaactttcatgaaaaatgctaattctgacgccgcncagcgtgcaacaganttggttacacntcanncacgnagcancaagantnngagtncnttnagaggnnacnngaagagttcnngnagncccnncaaagaccanngatngttnccacntnaggngcnnnggcncaaaccnnntnaagcnaacccaggaaaaa

SEQ ID NO: 240 - DNA, 302 bp, homo sapiens
  misc_feature (104)..(104): n=unknown
accgctgcttgtcactcacttcatggtattttcagagtctcagcctccttgcaaggatttctcaaagcatttaagaatcatataatacagaccagttattggcntttaagttttcttctttaataaaataactcagtggccctaggagaaatctgagaaattttcatactctaaatgagattttgcttgaaagtaattttctccgctggcaaaaaggattaatactgacatgaaacatgggaagtagaattgagtaacacctggaatttgaaaatgaaaggggcacagagtgcaggcaaggg

SEQ ID NO: 241 - DNA, 540 bp, homo sapiens
  misc_feature (519)..(530): n=unknown
ggaataccttcagagcagcgggctcgctcagaggtaatgctggaaacacaggtcgtccttgtgttaggacaacccaggatataaaggatatagatttgtacgggaataaattcacaggacaagaaatcgatgtgccttataggtgggtttactgcagaagtgccataatagaaccttcctacttttaaaacaaccagatctcactttctaaagagtaaaggatgaccggcaggatcacgtctgtgacgtgagtggaggcagtttgcactcctggtggctgtttgagaggtagcatttagaatgcctgtattcactgtcctgtgatgagtgggaaaataggttatcaggtttatcttagcaaaatcaaagcatgtcatctaattgctaaacaagagttggcaaatctgagagacattactcaatccttggcatgcaggacttactctgcatcctgttgccatttatgtcttcaaagcatttaatcatttagttgtgtttgcaaagtctttgagaagcctntgtcagaaatnccctacatct

SEQ ID NO: 242 - DNA, 79 bp, homo sapiens
  misc_feature (8)..(75): n=unknown
atatacantctanggagatgcactattagtggctncttaaaggngaatacacttgtttaaaccttcttcttcanngcta

SEQ ID NO: 243 - DNA, 299 bp, homo sapiens
  misc_feature (47)..(61): n=unknown
ggagtcggctaggcggctggaaacggcggctgccgccggtgactcanggaggcgggaggcnggggaggagctcttcctgcaggcgtggaaaccatggtgctcacgctcggagaaagttggccggtattggtggggaggaggtttctcagtctgtccgcagccgacggcagcgatggcagccacgacagctgggacgtggagcgcgtcgccgagtggccctggctctccgggaccattcgagctgtttcccacaccgacgttaccaagaaggatctgaaggtgtgtgtggaatttgatgg

SEQ ID NO: 244 - DNA, 524 bp, homo sapiens
ggaacccagctggaaagtgctgtggaaggacaaatggagaaaagtctccagaaattggcctcgtttgaaaggacctcatgcaaagagagatctttggagacatttcagaaaggtttttattcaaacatattcgcagcttgtatgacagtggaatgttttgaaatgagcttgattctgtttacccatccttcttaatccaacaactctgctggtctctctgctgacacaagatcgttcgcaggttatagaaggatttaacacgtcagcaacagggagctgccaccaccgtgtactgtgctgctgtcccagaactggagggtctgggagggatgtacttcaacaactgctgccgctgcatgccctcaccagaagctcagagcgaagagacggcccggaccctgtgggcgctcagcgagaggctgatccaagaacggcttggcagccagtccggctaagtggagctcagagcggatgggcacacacacccgccctgtgtgtgtcccctcacgcaagtgccaggggct

SEQ ID NO: 245 - DNA, 576 bp, homo sapiens
  misc_feature (36)..(36): n=unknown
acagcaggaggtttaagtacaatgtgaaagcaaganaactgagactgtgattgacagacaaagggattaactaacgttttattctctgccccccaaaatatcctgtgtattcttaagtatatacgcttcccttcctgcctttcaaggtatctaaggaatgatttgaaaaatttgttataatctctaaagaattttttgcatagcattagcaaaggagtctatgacaagtactttgccacctggtagttctgcgtattctactccctctgggtgtcactgtcatcctcactggctgggacaaggttctgagatttgtctccccagcagttgctaagctggctcagtcttggtcaggatgaatgaaacaattatctcctggatcaatgcagcaaggagcagtgaacacttgctttttcttccctaagtaggagaaggccagcccccggctgcagtggtggccgtggtggtagctggatgggacgaggggacctcaggctattctataacagtaaaagaaagagaattgctggtgcttctccagggagatacggaacctacacaccaagcaggttttac

SEQ ID NO: 246 - DNA, 436 bp, homo sapiens
  misc_feature (378)..(378): n=unknown
gcagttctttataatttaatattctattttaataaaggcgtttattaccatataaatgtagcaaagaacctgggctaatatgaaaaaaaaagactttttattaggtaatttattatatgaaaaggatattttattttatgataaagtgatccttaaaaaaataaaaaaactttagaaggtttagaatatatgtagggagagaagaagaaaaaaatacatttgtattcagagttaaatcttaaaaaaaaaaagtgtttttaatatatgtttgggtttacgttgcttttttcccccactttttttttggggaggaatgtcatttgcttttcttgggggagcatcccgggggtgaatggtggagagaggagctgggggaanccggtccctcctgggacccttccagtagattggatttcactccatggactcctcctcc

SEQ ID NO: 247 - DNA, 358 bp, homo sapiens
  misc_feature (130)..(130): n=unknown
  misc_feature (246)..(246): n=unknown
gtccaaaacttgtgagaacatacaatttaaagttgaaaactcatcattttgggctatttttgaatagggctgaaatatggtgacatgtcaggcactcagttttttggagctgtcttaaaggtgaggtggnaagtgagagatgattttgctctaattacccacacattctccctaaccctccattttaagacacttagctataatagcttaagactatcaaaactgcttttgtgattctcagtaggntctagttcaaagccatctcagtgctagtgattggtaattgttaatttgatggtaattaccctacttgtaaagttgacattcatactggctaatcctccctgcccctagtcgt

SEQ ID NO: 248 - DNA, 276 bp, homo sapiens
  misc_feature (10)..(269): n=unknown
tacaaaaggnctaattttatataactatgaggttcttntacatcagaataatatataaacanaggtgnaaatctggtaattacaaacacagaaaatanaaaccttgntcccttatttattactcacctttcagaacaagtcctnggctcagtngtagangtngggaagancancacntacngaagtttncangnnggngcncccaaanatgtctataaataacncatttagntaccctaangaacagcantggcnantagcatcaangngtggctt

SEQ ID NO: 249 - DNA, 354 bp, homo sapiens
  misc_feature (308)..(338): n=unknown
aataaacttgaagatactattacactaattaaaggaaagattgaagaagttcatcttcctgtagaaaaagtagatgttatcatatctgagtggatgggctattttcttctgtttgagtctatgttagattctgtcctttatgcaaagaacaaatacttggcaaaaggaggctcggtctaccctgacatttgcactatcagccttgtagcagtgagtgatgtgataaacatgctgatagaattgctttttgggatgatgtctatggcttcaagatgtcctgcatgaagaaactcagttattcccagaancngttgtggaagttttaganccgaaagacnccttatttcagaacct

SEQ ID NO: 250 - DNA, 122 bp, homo sapiens
  misc_feature (17)..(120): n=unknown
gaagacttatggcaaancaatgcaaataaaaaataacaaataataaaggggnnatggcattttagacttgaactaccctttcagtacatttgcatatactaaagttctngaaaacaattnaa

SEQ ID NO: 251 - DNA, 238 bp, homo sapiens
tcggaaaggaatccacatcatattggagatgaccccatcaaccccagggctccagcactaccaagttggaattccacgcccgggagtggggtagaggaagacgagacaggacgaggcagaaaagcacattttaaaaaccagacaagatggctaggccatcaccaaccaacggacttaccttacatctttgtaggtaattccccccaaatcttgattttttttttcctcaattatccct

SEQ ID NO: 252 - DNA, 464 bp, homo sapiens
  misc_feature (394)..(394): n=unknown
ttggagtgaaaggatttgttaaagattccataacaggatctgggttagagaatgcaaccatctcagtggctggtattaatcataatatcacaacaggcagatttggtgatttctaccgattacttgttcctggaacttacaaccttacagtagttttaactgggtatatgccattgactgttactaatgtagtggtgaaagaaggaccagccacagaggtggatttttctcttaggccaactgtaacttcagtaatccctgacacgacagaggctgtatcaactgctagcacagttgctatacctaatattctttctggaacatcatcctcctaccagccaattcagccaaaggactttcaccaccaccatttccctgatatggaaatcttctngagaaggtttgccaatgaatatcctaacattacccggctttattccttggggaaatcagtagagtcaaga

SEQ ID NO: 253 - DNA, 475 bp, homo sapiens
  misc_feature (307)..(307): n=unknown
  misc_feature (469)..(469): n=unknown
gtctatctgtattgattattagcacttttcctaaaatagttgtctgcaagggctaattttccctgctaaagaataagaagtttatacaattgctagccagttagtagaaagcgggaaagtatagctgagaaatgattatgttagcctgtaccttacagctcttaccacttacaaagaactttcatgtacatgatcgtgttagatttttacaaccactctgtcctataagtaggcctaggagctaccattaaagaaggcagaatttattggaaagcatcctggatctggagtaatgagaccagggcanggctgcaccctgattatgccacctcagccaaggtactggacctctcagagccttgatttcctttaaagggaatgatattggccctacctcagagagtaaactacaagattacatttgtacaagcacctccgtttaatagatgcttaatacataagaataganatagtc

SEQ ID NO: 254 - DNA, 428 bp, homo sapiens
  misc_feature (160)..(160): n=unknown
caagaagttcccttaaacctatcaagaataaaccatcaaagtcaaataaaggtagtatagatcaatcagtgttaaaagaattaccccctgaactcctggcagaaattgagtccaccatgccactttgtgaacgtgtgaaaatgaacaaacgcaagcgtanacagttaatgaaaagccaaaatatgctgaaatcagttcagatgaagataatgatagtgatgaagcttttgaatcctctaggaaacgacataaaaaagatgatgataaagcttgggaatatgaagagcgtgacagaagaagctctggggatcataggagaagtggccactctcatgaaggaagaaggagttcaggtggtggtcgttatcgaaaccgaagtccgtccagattctgacatggaagattattctcctcctcccagccttagt

SEQ ID NO: 255 - DNA, 437 bp, homo sapiens
  misc_feature (60)..(433): n=unknown
tgggaggaggagaataatcttccatgtcagaatctgacggacttcggtttcgataacgancaccacctgaactccttcttccttcatgagagtggccacttctcctatgatncccagagcttcttctgtcacgctcttcatattcccaagctttatnatcancttttttatgtcgtttcctagaggantcaaaagcttcatcactatcattatcttcanctgaactgatttcagcatattttggcnttcattaactgngctacgcttgcgtntgtncattttcacacgntcacaaagtggcatggtggactcaatttctgccaggagntcagggggnaattcnttnaacactgattnatcnatacnacctttatttgactttgatggnttantcctgataggtttaagggaacttcttnctcgagcngaattncgag

SEQ ID NO: 256 - DNA, 349 bp, homo sapiens
gcagaattgaaattggaatacaagggagcaagagtggatgttggcacaccaatcaaaagactgttgtaccagtccaggtagtttgggattgtggaaatagagaatttatagatttgaggaaaatttaggagataaataaacaggaatttctaaaacaaactgaatgagaaagtgtcagagatgtctccagaattttttgacttgtgtaaattaataaatattagtgccagttattaaattctgaaacttcatgagatctagatttgtattatgaagttagtttaattttacatatgttgattttaaggtgccaatgaaatctccatttggaaatggtggttaggatatt

SEQ ID NO: 257 - DNA, 225 bp, homo sapiens
  misc_feature (20)..(213): n=unknown
tgccttatcaatatcctaancaccatttccaaatggagatttcattgncacctttanaatcaacatatgtaaaattaaacnnacttcataatacaaatctaganctcatgaagtntcanaatttaataactggcactaatatttantaatttananaagtcaanaaattcnggagacatctctganactttctcattncagtttgtnttaganattcctgtttat

SEQ ID NO: 258 - DNA, 429 bp, homo sapiens
  misc_feature (344)..(393): n=unknown
ccctcgcggatgggcaggtgctgttagcccttggcctggaaaccaccctgtctcctcagcagcctcctgagccgtagtcccccaaagggcagcccagcggcaatatctgtggccaccccaccagaaagggacttagatccccagagagcccggcacggtgctcctgccatcatcacccctcctgtcccttgttcattcagtcattcagcaagcatttcaggccctgttctgtgccaaccctgtgctgggcctgcgggtaccaaggtgaatcaggcatggtgccagccccggagaggtccctgacctgtggggagacataccattagcacacagacaacgaaatncaggngtcctttcacctatatgtgccaaacgcccttcaaggctcaaggntacagtggaaacagataaggttctccctggtctcct

SEQ ID NO: 259 - DNA, 549 bp, homo sapiens
  misc_feature (6)..(540): n=unknown
tcttanagttggnatgaacctcagaaattccttatctcttccatttcccagataaganagtgagactgggagataggattgactttcctaagaccacagagtngnnnnggaggagggactgagttggataggtcagtttgggcagcaagacgggcttctatctttatcccacagtcccaggcaccattgtgcttgacacagaatccaaactcccagctgtggcctacaaagccctggtgatcagggccttgccaactccctccagcctcacctgaggcacccactccttccctgtcatcaggccccggcccaccttgattgccattccctttgccaagaatgcccttccgcctgatcttcatgggtcaggatccatcttgccattcagtgaaatgtcacntcctctgtgaggccttgcctgatcacctctacagttacccccattgctctcanctggggtctgttttgttttttccatagaagttatgatgacctgnaataatcttttggtgtttcctgctttttgtgtgtaacctcntncaacctaag

SEQ ID NO: 260 - DNA, 474 bp, homo sapiens
  misc_feature (25)..(473): n=unknown
gtgaaatgctctagcaatgaagcanggnaggnagangggggaaaggaaatttgagccaagcaacctgaaggtcaggggaagccggtcttacagatgttaagggaggaatccaagtaggcaaaggggatgaacagcagtgcaaaggctctggggcagcaggttgcccggtatgttccagaacaggaaggcggccagtgtggctggcatggagagctaaggctcaaaggagaaagtgaagagaaagaggtagtaagggaccaggaggaattgagcccggccagccgtgctactgatgttagcccacatgtcacagtgtgtgagggagatagagtccttgggaacaataatatgcagagcttttaaaaactttcatactgtagccatcaattccatcatcatggtggtggtatccctgggtggtggtgggttacttggtagagtatacgtcaacncgnatttcttcctccaaaagna

SEQ ID NO: 261 - DNA, 520 bp, homo sapiens
  misc_feature (5)..(495): n=unknown
attcnnnaggcntgccangnccacatcctctctctacagacngggaaantntctccaacagcaggagccaggctcaacggcggggcaggcatatacatggcctancatcttcaggcctcagattttccattaaaaaacagggataacaacaagatccaaccctacgcataggtnattgggattcaataccatttttaaatgtcttatgaattataaggtacgcnacaaacgttaagttttcagaataangcatgtcattccatgattacaaacttgtgcttttgttttgcagtttatcctgtaagcacgtcccagtagtttccccaacctcaatggtacctcagcgtcttcattccactagntcacttctaggtctttttcaaattttatatacttttgaggaagaaattcgagttgacgtatactctaccaagtaaccaccaccacccagggatancaccaccatgatgatggnattnatggctacagtatganagtttttaaaagctctgcatattat

SEQ ID NO: 262 - DNA, 466 bp, homo sapiens
  misc_feature (462)..(462): n=unknown
ctcagattaacttcctcagataaagtgtcagcggtctgcagaaacgaagaagacaaaactgagattatcactcataattctcttacttactatgtcagtgaaacaatgagtttgcatttttgcaatcctagaacattcttcattagccctgggtcatgacctcttccagttaattctctttcacacctttaggaaagatttaagatgaaccttcaataggatattaacataactcatagccaataccacagctgcctttcaaattaatgaggttaattgttctccagcaaacatgagtttgtctttggcattttaaatgcttcccattgatctgacattttgctgtttcaagttttaaagggctcaaatcaaagactattgataactgagcaaagagcgaagatccagaaatacgaaaacattgtctttttttttccatgaaaaacaatcatagccttttgnattc

SEQ ID NO: 263 - DNA, 500 bp, homo sapiens
  misc_feature (438)..(438): n=unknown
aaatgaaattttcctgtatttacatttttacaccatatgaccgggcacttctgttgcctcaggagttatatacatatcagtttgcacacgaatttcaatccccattccttaaaacagttgataacacattgaacaaaattaaaagacatactacaagaagacaaccatagtatatacttcctctatcatagaaaggtgttaagcaaacatataattttgtagctatgcttggaaatatttaatacacttattagcacttcctcatgcagtggattaaaacatgacagatataaactgctgcagttgatcagtgaacattaattcccaaatgaagaccattgcttagagcagacagcttgctttcagctccaccatacaagacatcaagtcagttctgatgtgggttttggattctgtttgaatgtagctgtgaatagnaaccctctgcatatggagttcaatcctagccttgttgggtaaaaatggactcagacataaac

SEQ ID NO: 264 - DNA, 486 bp, homo sapiens
  misc_feature (81)..(461): n=unknown
cagtgactttaaactaaagaacttaattaaagaacattgttcccataggttaaatttttattcttatttaaacatattttnnnnnnnnnnnnnnnnnnnnnnnnnnnnnnnnnnnnnnnnnnnnnnnnnnnnnnnnnnnnnnnnnnnnnnnnnnnnnnnnnnnnnnnnnnnnnnnnnnnnnnnnnnnnnnnnnnnnnnnnnnnnnnnnnnnnnnnnnnnnnnnnnnnnnnnnnnnnnnnnnnnnnnnnnnnnnnnnnnnnnnnnnnnnnnnnnnntatagggtcattttcatgggtataataaaaattatatacaagtataaataaaatcctgagtcttaaaattctgagtcctgcttaaacattttaaaaattntgttatgtatttttctttgaacatgtctctctgcctggcaaaacataaccagaattttagtattggttacatagagttaactatanccataatattactctaaaaataaat

SEQ ID NO: 265 - DNA, 561 bp, homo sapiens
  misc_feature (288)..(483): n=unknown
caatattgctcttttcttttgaaaataggtacaaactcacactcacacaaaaacagtccataactttcttgcacttaacatttatttttagagtaatatatgggtatagttaactctatgtaaaccaatactaaaattctgttatgtttgcaggcagagagacatgttcaaagaaaaatacataacaaaatttttaaaatgtttaagcaggactcagaattttaagactcaggattttatttatacttgtatataatttttattatacccatgaaaatgaccctatannnnnnnnnnnnnnnnnnnnnnnnnnnnnnnnnnnnnnnnnnnnnnnnnnnnnnnnnnnnnnnnnnnnnnnnnnnnnnnnnnnnnnnnnnnnnnnnnnnnnnnnnnnnnnnnnnnnnnnnnnnnnnnnnnnnnnnnnnnnnnnnnnnnnnnnnnnnnnnnnnnnnnnnnnnnnnnnnnnnnnnnnnnnnnnnnnnnaaatatgtttaaataagaataaaaatttaacctatgggaacaatgttctttaattaagttctttagtttaaagtcact

SEQ ID NO: 266 - DNA, 409 bp, homo sapiens
  misc_feature (344)..(344): n=unknown
cacatgctgatgacaaagaagcttgtttttctgggtttagtctcagggtggggttggaggtgaggctggggtcccccctagctttatacttagaaaccctgcctttattagggtttgagaaatgaatttacattccctgctcaacccaggagtcatgaagtccaaagactgacagaatggtcctgggtgcattaaacctttgagtcacctggcaaaaataaatctaaaagtcaccaagaaagctgcagggttggcatggataaaacactgctgcaggtcagctcacagcccgcagattctaaaacccctatgctcacagcccaccatgggtacgagttcaccgncataacacacaggaaggagttccttagatccccaagaatttgagtgtttcacgtatcctacaaga

SEQ ID NO: 267 - DNA, 356 bp, homo sapiens
gatgaggtggaggaagatggaggtgaggcttggctgctgaggcacccaagtgtgaccaaaatgcccacagagagccaacgtgcactaagagctgctcctcctcttcctttttttcctaccctcgacctcagtctgcgttttgtgtcaggttgactgttctgaatccccaagaccccagttatctcaaggagaagcattcattttccggagaattcattagaagtcaattttgtttttatgcaagtaggaaaaaacttgcacagctgccccagctcttcaggaagagccattcaaaagccagatcatccagaagggtgaccttctggaggtggggataaccgggcttagttgaagtt

SEQ ID NO: 268 - DNA, 278 bp, homo sapiens
  misc_feature (246)..(246): n=unknown
gcccttactattaacttaccacctgtggtgcagaaatagtatgttcaagcctatcagcttttgagaagattccagatttcattctcatatgaaatggccatttcatatgtcattatcatgttgagatgtattaattcactaagtttttataaagtatatgtagatatatactaacatctcagagcttccatcatggctccaaaccatttatcaaataaagttcatcaaagtcacaatcttcagatnataaaatgaatacaaaatttattaagtcgtta

SEQ ID NO: 269 - DNA, 365 bp, homo sapiens
  misc_feature (200)..(200): n=unknown
cctcctcttctcagctcccttctgctgggagcacctggctgccagttcccaagttcctctccatggggaattgcagctccaaggtggcctcctggagctgcctaactccgccttcactgaaaataaggtgattgaactgtaaagctgaaatcctctgcagtcatgtctcctccagagtcttcaaggtcactcccactttntttctagacacaaatggggtcatttttgtaattctaattaacactgtctccagacataaataaaattttaaatttctcattgctatcagctgtttccactatgtttttcataaattggaatgcaattttaaacagttaataaaattctccagtacaagagcaaaa

SEQ ID NO: 270 - DNA, 260 bp, homo sapiens
acgtgtgtattcatcagcctctgcaatcaagttcctgagccctggtcatttcacctatttagtgttctgtctgctttgctgtgtaaggaagtgccttttattaaaggctgaacatttttaatttcagggaaagccagagtccaggctgaaacccacaaataccatggcaacctatttagcactcttgacacattactaccctaatgaagacatccttgctaatgccagagccaaacagctatttattaactcagcctaac

SEQ ID NO: 271 - DNA, 389 bp, homo sapiens
  misc_feature (75)..(75): n=unknown
  misc_feature (355)..(355): n=unknown
aagactttggttttatattcagtaaaatgaggcacccttggagggtcttgagtaaagcggagacagaatccgatntccccctcttttaaagggtactctgtctgctgtgctgaggataaactgtagactatctcaaagccagttgcatagtattttatttttcttatttaatattgcccagatatttaagttcttatctgttgttacctttggaagttttcattttttaacatctactctctacattttactcttttctgattataaaattaatatggatcattgaggaacatttacaattatagacaagcataaataaataaacaccttccaaaaatccagaatcagagacaancactgttaatatttagtatattccaaccattttt

SEQ ID NO: 272 - DNA, 587 bp, homo sapiens
  misc_feature (344)..(581): n=unknown
  misc_feature (12)..(12): n=unknown
ataactcaagantctacaagaaaataatcattgattttcctcctagaaatccattctaaggatataatctaaaatgtagacagagagctatgcacacagtaataagagaaagaaatgaaaacaatttaaatgtcctcaattaggagaatatctatatgacagaatgtttacaaagagttcttgattacaccggaaaagacttaagatattcattttaaaacacaggttcaataatataaagaaaaaagacacagaaaaatggttggaatatactaaatattaacagtggttgtctctgattctggatttttggaaggtgttctatgtatttatgcttgtctatnatngnaaatgttcctcantgatccatattaatttnataatcagngaagagtaaaatgtagagagtagatgttaanaaatganaacttccaaaggtaacaacagatnagaacttaaatatctgggcaatattanntgaganaaataanatactatgctactggctngagatagtcnacagtttatcctcagcacagcagacagggtaccctttaanagngggggagatcggattctgnctccgc

SEQ ID NO: 273 - DNA, 465 bp, homo sapiens
  misc_feature (430)..(430): n=unknown
gtcttttattgttgatttctcatttggttaggtcggcagcacagatcatggtctatatggttggttcttaatatgtattgagacttcttttatagagtattattttggaaatactccatgagtacctgaaaaaatatctattattttgtcatattttcccccaaaggtaggcatgtcagtggtgataagctaatatctctaaaaactttgtaatagtaatttttaatgtttgctttagtattatagtgcatttctactagaattagtatggtaattctctctaaaggcttaaactttgctgtctcattttaccttttttacccccaggttaaccaaatattctttaggccatcatcatttgtcagtgaaatggtgggattgggtggagagggatatgaagcatacttaacacatgcatttctttaaatancacttgccagccccagaagtgtgagccagactttg

SEQ ID NO: 274 - DNA, 578 bp, homo sapiens
  misc_feature (125)..(372): n=unknown
gctaactgtacactacgtactaatgatgttcaattattttatagaagaagtgtatttcaatatgtttttaaattttaaagtaagcttctttgtgacccaaaattaatcaccattgatgataatgnagatctttaaacctgttacaaatcagttgacaaatttaaatttaatatcttttattaagatagaaccctgagtgtatacaanatgcaacattaatattccacatattcatatagtaagttgcttatctaggagagggtantttcagtgctaaatttgggattttacctacattcgtaactcctcccatgtgatttttaatatatatgtnaataacaaagtctggctcacacttctggggctggcaantggtatataaagaaatgcatgtgtaagtatgcttcatatccctctccacccaatccaccatttcactgacaaatgatgatggcctaaagaatatttggttaacctgggggtaaaaaaggtaaaatgagacagcaaagtttaagcctttagagagaattaccatactaattctagtagaaatgcactataatactaaagccaacatt

SEQ ID NO: 275 - DNA, 483 bp, homo sapiens
  misc_feature (201)..(470): n=unknown
agaaaaccttttgaaactggcacaaaggcactgggagagactggcagggccccctacttgacgatctggctcatccatctgcacactgaccacgctaagagctgtctgcagtgatggaaaccttctctagctgtgctgtcctctatagtggcaccagctgcctgtggctactgagcacttcaactgtggctgtagagactnnnnnnnnnnnnnnnnnnnnnnnnnnnnnnnnnnnnnnnnnnnnnnnnnnnnnnnnnnnnnnnnnnnnnnnnnnnnnnnnngtgcacatttcctgctggccatggacagtaagctccataagagactaattgtgcctggtttgcttataggcttatcctcagcacctgcaccagcctagaatatgattggcactctattaattaaaagttcccaggtaaatgaattagtggattctctgtttcctccactatggccacaacctccttaanggcagagatggtg

SEQ ID NO: 276 - DNA, 444 bp, homo sapiens
  misc_feature (5)..(246): n=unknown
gaggnaacagagaatccactaattcatttacctggnaacttttaattaatagagtgccaatcatattctaggctggtgcaggtgctgaggataagcctataagcaaaccaggcacaattagtctcttatggagcttactgtccatggccagcaggaaatgtgcacnnnnnnnnnnnnnnnnnnnnnnnnnnnnnnnnnnnnnnnnnnnnnnnnnnnnnnnnnnnnnnnnnnnnnnnnnnnnnnnnnagtctctgcagccacagttgaagtgctcagtagccacaggcagctggtgccactatagaggacagcacagctagagaaggtttccatcactgcagacagctcttagcgtggtcagtgtgcagatggatgagccagatcgtcaagtagggggccctgccagtctctccagtgcctttgtgccagtttcaaaaggttttc

SEQ ID NO: 277 - DNA, 406 bp, homo sapiens
  misc_feature (330)..(361): n=unknown
gcttgccctggcttgcacagctggtccacgagctggatctgtggcagggctttcagcgggggccagagcttgagcttctaaggtgctcctgctctcgctgacagcctcagagggcctggggcagagaggccccctctgcttctcctgggctttctccctgagcttcttgcaacacctccctgtgagcacacatcttcctggtggggccccttctgcttccgctctaggggaggctctgtggcttgggtctgggggccaccgttggggatgcggatggccaggagtggggctgctgagcgcctgggctagtgacagcctgcctccaaccantcccagaagccctgctggaatcccccacctnttccgaggctaggagcatctgcctctcctcaaacttcatacagtc

SEQ ID NO: 278 - DNA, 416 bp, homo sapiens
  misc_feature (57)..(404): n=unknown
aaggttatttggtgacaggaacaatgggccaagggtggggactgtatgaagtttgangagaggcagatgctcctagcctcggaagaggtgggggattccancagggcttctnggantggtttgaggcaggctgtcactancccaggcgctcagcagcnccactccnggccatccgcatccccaacggtggcccccagacccaagccacagagcctcccctagagcggaagcagaaggggccccaccaggaagctgtgtgctcanagggaggtgttgcaagaagctcagggagaaagcncagganaagcanagggggcctctntgccccaggccctctgaggctgtcagcgagagcaggagcnccttagaagctnaagctctngcccccgctgtaaanccctgcnacagatccagct

SEQ ID NO: 279 - DNA, 543 bp, homo sapiens
  misc_feature (451)..(529): n=unknown
caagcagtaatctgagtgggacgcagggaatttggtgccccagaaaaaatgtgccaggttggcctggtctgggagtacccagggaggcttttcaggaggggacacataaaccatttccttgaacaaactcatcatgttcaggcaggcactcaaggccttctcagtggctttccagacttttttctgactcttgcctttgctacagccggatggtccaggcaccactctgggctctcccgagctccttccacctctctcctcctctcaacccacaggacattttacaggatctgcttctcacctggaatgtctcctctgactcatctcctttctgtttcaatgtgctttcccatttcttaacatccaatgataattccctgtgggtcagtctctccccttctcaccaccaatggcccttgggatctgatccactcattggccagttaatggncttgttgagttggaaacagcatttcatttattanatannaattataganagccatcagcctaggcaacacagtgaganccccccttgtctac

SEQ ID NO: 280 - DNA, 511 bp, homo sapiens
  misc_feature (237)..(341): n=unknown
ttctataatttttatttaataaatgaaatgctgtttccaactcaacaaggccattaactggccaatgagtggatcagatcccaagggccattggtggtgagaaggggagagactgacccacagggaattatcattggatgttaagaaatgggaaagcacattgaaacagaaaggagatgagtcagaggagacattccaggtgagaagcagatcctgtaaaatgtcctgtgggttganangangagagaggtggaaggagctcgggagagcccagagtggtgcctggaccatccggctgtagcaaaggcaagagtcaganaaaagtctggaaagccactganaaggccttgagtgcctgcctgaacatgatgagtttgttcaaggaaatggtttatgtgtcccctcctgaaaagcctccctgggtactcccagaccaggccaacctggcacattttttctggggcaccaaattccctgcgtcccactcagattactgcttgcttcgagccga

SEQ ID NO: 281 - DNA, 466 bp, homo sapiens
  misc_feature (205)..(205): n=unknown
  misc_feature (411)..(411): n=unknown
gtgatactcttatgaatattaatagcaaggttattccatctgtgctatgggatcttgctgctgctgctgttgggttttatgttgtttccatggcaggggaaggtagatggtaggagtgagtgttttttagttgtgagctttttttttccttgagctataaatatttaaaagaaatttgaatattaatatgcttttctgtttatgntcatgaaatgcttgaattctctattacttctttttaaagcaagcaactaaataatcataatttttctcttaaattttgcctgcctcacagtttttacagtgtgaaactgatagcattgtcaaaacaactctgacattctgaattacatatacacaggaaactgacaaatgtttatgagtacatgggatttgggtttttcttttaanctatgtattagtactataattactagttattttgagggcagaatagtaactgtgt

SEQ ID NO: 282 - DNA, 484 bp, homo sapiens
  misc_feature (3)..(3): n=unknown
  misc_feature (212)..(212): n=unknown
  misc_feature (35)..(478): n=unknown
ttntttattgcatccatgtgaaattccttgaagttttcttagagtatatggaatctttatgataaatccataccatatcagaaagtatacatgaaagttctagttatatcattgtgctactaagagtttaacctatatggagatcagttacacacagttactattctgccctcaaaataactagtaattatagtactaatacataggttaanagaaaaaacccaaatcccatgtactcataaacatttgtcagtttcctgtgtatatgtaattcagaatgtcagagttgttttgacaatgctatcagtttcacactgtaaaaactgtgaggcaggcaaaatttaagaganaaattatgattatttagttgcttgctttaaanagaagtaatagagnattcaagcatttcatgatcataaacngaagaagcntatnaatattcaaatttcttttaaatntttatagctcangganaannaaagct

SEQ ID NO: 283 - DNA, 503 bp, homo sapiens
  misc_feature (452)..(486): n=unknown
gtggttctctttctttgcagtggcacattgctaaattttggcacatgatgaagaagatgtctcttcagttgcttaagaagtggggagcaaagagaggtagagggaggtgaaacttataaagggaaaggcaggaggaaggttgccaatgcaccttctagccggaagctgttgtggctgcccatgccttttatgacaaaccaaacttaaccatgggccatttgtcccctgtggctccctttgtgtttctcgtttctcgtctatgttgatggcactcctgctccttgtttcttgatgttcctgcatgctaaattatttcagggcagtgaaagccatctcaactcctagttgtaccaaagcagaaatgtcaactaaattatctttaatgaaatcattttcttttttaatcatagagtcaaccaaagtggagaaaaaaaagatttgctttaattgcngccacttggaacacccagcctggggttaaacatnctttcatcttgcatgat

SEQ ID NO: 284 - DNA, 375 bp, homo sapiens
  misc_feature (17)..(362): n=unknown
tgacagcggtgttagananggntaggtagaacctatattacgganntcagccttgcccatttctttagtncagtgattaaaattgaaattacttttacaaaacaattgaactgctgcttacaatataaacagaataccaacaggattcctgttgtattcacattattctctaattagtatttttacatttccactttcnntccagaaccaangccactgccttagcccaaggtcanctgtgngtgcctangctcttgcaacagtttcctagctggtgtcccttgantgccgtcttttntaacacaatccatcnctcacacagccacaggnttgtctcantttcancacagcctgcaacatancattctgctttaa

SEQ ID NO: 285 - DNA, 385 bp, homo sapiens
  misc_feature (13)..(13): n=unknown
  misc_feature (204)..(204): n=unknown
ggctggcacagtngagggggaatgtgcctgacttgtatataaaggcagcacagtggctgggcaagacacacattgtggacagaaccaagtttatggaccagccttccctgtgaaatttgacttttccctctttgctgaattggtcaggttaacaatggttacccctggattacaggaagggcatgtgctaaaagcctccttgcnagacccacatggccctcagatgagcaattgttcagattccttttctttttcttttccatgggaataagctttcctctctccaaagtacatgttttaggcttttttattttcttgctactcccaaggacctggtgatatttttctttaccatgcattaaacagaatctgtgagtcttttctg

SEQ ID NO: 286 - DNA, 217 bp, homo sapiens
  misc_feature (12)..(217): n=unknown
atcaatatcacnanntccttgagnantagcaanaaaataaaaaagcctaaaacangtactttggagagangnnagcntattcccatggaanananaaagacgaggaatctgaacaattgntcatctnagggccatgtnggtctccaaggaggcttttagcacatgcccttcctgtantccaggggtnaccattgntancctnnccanttcagcnaan

SEQ ID NO: 287 - DNA, 415 bp, homo sapiens
  misc_feature (336)..(336): n=unknown
ctttttttgttggtatttgtttgtttacattggcactattttatcttggtactacttttcagatttgaatcatgttttcatactttggctgccttgtctgctggttttcgtgtggctttgtcttttagaatatcttggctctatcttataaagagagagaccctgggtagaagagtatgattaagtctatcaatatcttggttcattattgccagataatggcaggagaaataggctctgcaacccaagccagttaattttgctttttgttaaaagctttattgaaaggtcaattaggataataagatgaagggaaggttatctttcaatattagntatcagtgtaagatctctttttttctctagtattatgggacaagtttaagattgattcaatatggggagaagcatttta

SEQ ID NO: 288 - DNA, 593 bp, homo sapiens
  misc_feature (550)..(550): n=unknown
tattgtattaggtgctttcctacattaccctttctgtggcattaaatgtattttcaaaagatgaattatcaagagggattattcaaattagagaagcacacacattaccaacattattgtttttaaataatttatgttcaaagagtgttgttaaaaatgtacacatttcaataccaatctgcatatgcagcatttaaccaaaaaattttagagcaaatcatactaaattgaagagtcatggataatgtgaaaattctgcaattttagattaatttactttcaagttcaaataatagaattatctgcatgattacaaactatgcacttcaaagagtagttagcatcccttgacagtgccttaaaatgcttctcccatattgaatcaatcttaacttgtccataatactagagaaaaaaagagatcttacactgataactaatattgaaagataaccttcccttcatcttattatcctaattgacctttcaataaagcttttaacaaaaagcaaaattaactggcttgggttgcagagcctatttctcctgncattatctggcaataatgaaccaagatattggatagacttaat

SEQ ID NO: 289 - DNA, 404 bp, homo sapiens
ggtacttacattttttagttatcataaaaattgagcccccaaaacattacaaagaacccagtaaaacctaagatcatgaaaaagcagtcaagagaacccaacaaatgagagaatttatacctgagaaaagaagaacaatctggtgagagtttaaaaataagttaaaattctcaatatatgtacagaagaagttagattttacagagtgaagaacagataatgaaacaagaagagaaagctgtgagaaagaagcgtttagacatcttgaagtgaaaaatattataaatacaatattgaagtaaaagaacagttagactgcacatactttctatagcttaagagaaaattacaggttaggaaatagaactgagaaaatctttcagaatgcagtttagagagagtta

SEQ ID NO: 290 - DNA, 442 bp, homo sapiens
gtcatctttcatgtccatctttctctttcattttcttctaactctctctaaactgcattctgaaagattttctcagttctatttcctaattctgtaattttctcttaagctatagaaagtatgtgcagtctaactgttcttttacttcaatattgtatttataatatttttcacttcaagatgtctaaacgcttctttctcacagctttctcttcttgtttcattatctgttcttcattctgtaaaatctaacttcttctgtacatatattgagaattttaacttatttttaaactctcaccagattgttcttcttttctcaggtataaattctctcatttgttgggttctcttgactgctttttcatgatcttaggttttactgggttctttgtaatgttttgggggctcaatttttatgataactaaaaaatgtaagtac

SEQ ID NO: 291 - DNA, 467 bp, homo sapiens
  misc_feature (255)..(255): n=unknown
  misc_feature (417)..(426): n=unknown
gccagggtggtgtccgtctgctcacctgaggagctccctgggtctgccagcttcctgcctggccaagcccttcccctgcacttgtaagacgacgactgagcgtggctgatcctgcccggtttctgggtggatagtggaacctgggggaaccagggtagaatcccttatgggaggcagccattggcctggccaggctttgggcgctgttggagacagggctgaatttttagccctgagtgtaggcacaggcgaganctggagcccaggcacttgttccctgtgtggctggctgctcatctctgatttagctttggctcaatttttgtcctaccccctgattgctactggagccagcatggtggtcacagccactggtgtcttagggccctggaagagaagacagcaatcccaggttgncctntcctntgctcagggctgatcctggcagacatggaagaggagatagg

SEQ ID NO: 292 - DNA, 405 bp, homo sapiens
  misc_feature (87)..(393): n=unknown
acactgttctggagcccatcccaccacctactggtggggttccacttcactggaacacctctcacaaggcggctcccttctagcgtncgggattccagtgaggtgtggcatgctagactgccacatgaagttttggctgtggcccttccccgcatcacctccaaaactgtaaaatgcttccccgaccttggagacggggaccagagagatgctccctgcagttcttcccagaggtgtgggggccttcacatgggctgacgcagctcaaacatgaactgaacgatggcttgtntcttccngcatttgncatgnngacccagctccctcccaagtcttntncntatctntcctgcctatctngtccnccatgtctgccaggatcagccctgagcngagggatgaggg

SEQ ID NO: 293 - DNA, 383 bp, homo sapiens
  misc_feature (313)..(313): n=unknown
cagtcttctcggggcatgctgtgtgcagtgggtacttacaagttaactggtaaatgtaattctcatgagctgggtgaactgggggcaacttcgagcccttccccttgaccaccttagggagcaggggagctagctgtcctcagcagcctccgcagcccacccaaagtctgtccctcgctcagggacatggcagcccccagcacacatcctctgctcccgtctttcccgcccctggtgttttctagcctaccttgccctgtgtgtccctctggaatcaaatcatgggcagatgtagctgctgctggccgtgggncccgttctgttccctgaggtggcagcctctaacctggcaagtgttcttgtgtctctccagtgcgaggacg

SEQ ID NO: 294 - DNA, 596 bp, homo sapiens
  misc_feature (538)..(564): n=unknown
gttcatttccaatcacttctctccggttcttgttcctaagcggcccaagccaagatgatcattccagtttattttcaactttccgctggatcttccatgccctccccaatttggccgacgcagagggaggcgaccctgctgggttcacagcagcaaatcgtcgtttaagtccaacaaactagtcaatcttggtcggctggcaccgaacaaacccatctcgctctgggtccccaggtgcagaatcgatgtgtgttcttcaccaacgcacagaccgcttcttcactccagtgttcacttcctccagtcttcagccgagaggacatctgcggtcataaggccactcggatgcagtggtgcttgagtttgcaaggcaggactcctttgttcagctggtaaaagtcaaccagctggatcaggtcagagaatttggtgttcccgtcatctaggctgaagaacgtctgcccgtcgtcctcgcactggagagacacaagaacacttgccaggttagaggctgcaacctcagggaacagaacggggnccacggcaagcagcagctacatctgnccatgatttgattccagagggacacacagggc

SEQ ID NO: 295 - DNA, 386 bp, homo sapiens
  misc_feature (366)..(366): n=unknown
gctagcctaactattccccaacacctttaggaagataggtcttccctgaccctcagtctgaggtctagaagcccttctgccttgcctcacaggcatcttccctcctcccccgtcccctagaccagtccaacagcagcccgtgcagcctctgaagtccactcccagtgctagctgatgggaaccccatgggctcctgtctgctatacaaatggaacagactttcttcagagccaaccccagctgccccactgaagctggttgccacagtgattttcagtctcataccagattctgatctcttctcttgcccacctttggtgctgcagagtggatcatcttgttttatactcaagtcatcattaaaanttatagaaaaagagagaatt

SEQ ID NO: 296 - DNA, 351 bp, homo sapiens
  misc_feature (15)..(347): n=unknown
gcttcaacatacganttttcagntcatgacatctacatatgtatgactgtatcagtcaatgtctagtcaggaaaacagaaaccactggagataattcaaacagagaggantttcatgcacagttagttataaaagtgtaggaaagactggtggaacaaaatgcagaagttacctagggatcagaaagccgctaccatggctgggttgggagcccacaagcctgcantttctgnttccactgctcgagctgaaaccacatttccgctgctgaccagaaacctaggagcccacacccccactgnttctantgaaactgcctattatgctttcaactggaaggggttgantttt

SEQ ID NO: 297 - DNA, 536 bp, homo sapiens
  misc_feature (469)..(531): n=unknown
gatacaaaatcaacatataaaatcaatgtattttatgccagcaatatacagtcacaaaatataattattagaaacttctcatttctaattataatggaaatttacatataagaatataacaaaaaacatgtacaacctttatggaaaaaattatacttcattaaaagatattaatgatgacctaagtaaatggagagagataacccatgataatggatagaagagtcaataccagaaaaaagagtgaattttccctaacttaatctaaaaattcaaccccttccagttgaaagcataataggcagtttcagtagaatcagtgggggtgtgggctcctaggtttctggtcagcagcggaaatgtggtttcagctcgagcagtggaagcagaaagtgcaggcttgtgggctcccaacccagccatggtagcggctttctgatccctaggtaacttctgcattttgttccancagtctttcctacacttttataactaactgtgcatgaaattcctctctggtttgaattatcntccag

SEQ ID NO: 298 - DNA, 186 bp, homo sapiens
cttacagcaaatagatttgggatggaaaataccagacctctggttgtgtcagggtttatcctaatagctttcctgagacagagctcagactttcatttttgatcttccaccccagggccccctctctgtctatgggatcctttctcccctctctctaccattttcccgtaccttcccccataagtc

SEQ ID NO: 299 - DNA, 447 bp, homo sapiens
  misc_feature (19)..(19): n=unknown
  misc_feature (386)..(414): n=unknown
ccacacagtgagaatttanggggagatcttaaactacttatgtagttgcaaagttgaaaaatttactgatcctaatggtaaggcttattcacaaattcaatacattttgaaattatacttcaaacgcaattacttcgaaaaaagattaacctgctctccaacaatataagagcattatattctaatgaaaaaattggcaccaaaccagtatgctatttttcaaaagaacaagtgatattaatgaaaaatattgcctaaaacgcatatcctaacttatcacagaaatataaaagtttatattttgaaaatatatactgtattaaagtctgtaagcatttcaaccaaaatttgcagaaataactaagcaacacttatctacaacaaanatatacatgcaagacaaccccaaatggnttcccttaaatatctacaaaggcaaagtgtaga

SEQ ID NO: 300 - DNA, 382 bp, homo sapiens
tttcacaactgtatactgttgactattcaaaacacaaggctaagaaatggcttcaaattctccattagggaaatttacgtaactttgttttaaggtttctaattgcacagtagttgtatacctgagagaagtgaatactttacctgcttaagctctgtgaaagttggattccaatgaaaagatgaatacatttccctcacagactcacctggactgattcctgctcaccctattctttctttaaagaagacatgatcattgtcttcaggcactattatttaatttatcttctattaagaattaactgttttgttcctcttgattcacagaaagaaacagaggtaaaggaacggtctgtttttgacatccctaatatttacag

SEQ ID NO: 301 - DNA, 577 bp, homo sapiens
  misc_feature (9)..(9): n=unknown
  misc_feature (344)..(344): n=unknown
  misc_feature (541)..(544): n=unknown
aagcctgangggttttgcagggggatcctgggagactggccaagcacagctgtaggtacccatctttaccacaatgggatcagacttgctcttacttattttatattttggactcccatgtaagtttttatttgtgcaaggggttccaggctaagagtttgaagacaagtgaatttgtgatttgcatttatttcctttcatccagagaccaaagaagctttgacaacaatgccctagctttccttcactggtctttgagtagtcctaaggagggataacactaccattgcttttgagcaatgaatttcttctgagaactaagtcccctgtcaaaaatctgaganacacaaaaagaaacttcagtaatcacctttgctatggttcaagaattcctctgtaaatatagggatgtcaaaaacagaccgttcctttacctctgtttctttctgtgaatcaagaggaacaaaacagttaattcttaatagaagataaattaaataatagtgcctgaagacaatgatcatgtcttcttttaaagaanagnataggggtgagcaggaatcagtccaggtgagtc

SEQ ID NO: 302 - DNA, 368 bp, homo sapiens
  misc_feature (2)..(2): n=unknown
  misc_feature (97)..(97): n=unknown
  misc_feature (326)..(326): n=unknown
tngagacaccatttcctctgctcctgaaggggacctggacccagaccctttcctctgcacaaccagctagggaaggaggtgctgtttactgggtggnagctgtgacccagacactgccgatgcccgatccgaggctccctgttgaatctgaaagccagccctaggaggtggctattatccaattttatgggtgaacactcccagctatccagggtcatccagggacccaacgtcagagtagagatttgagcccaggattcctgatcctgagatgtctctcttctccttccatccatggtcactcagacacacgaaccccgggcgancactgactgagggtttgcgttgtagcaaaaaagggatgggag

SEQ ID NO: 303 - DNA, 67 bp, homo sapiens
  misc_feature (11)..(54): n=unknown
gttaggataanaannttacantgattganttntttcatttagttacatcantanaatttttataaat

SEQ ID NO: 304 - DNA, 488 bp, homo sapiens
cccttcccactgccgtgcttctgtttcccttctatgaagtgaacacctgcgggcctgcctctccacggcagcagatccatatgtcagagctctttggaaactaaagcgcagggcacctccagggaataggtgttattgatagaagtggggcgggggcaggagtgaggcttcgcccattttggggccctctctctttgggaaaggaggtgatcccgaggcgaaggcgcagatcgataacctgcatattggggtgcgcgtcagggtggacaccgcagcaggcgcctttcctccctccccacgtcctgagtcagctctgcgccgctggagcgaaggccgggccccgctggcccactttggggtaaaacgggttcctggcatctcgcgggcgcggtcgttcgccccgcatctggtcaggacttcgccccccggtagatggcttgggtgggcttgtacagccctgggaagcgatgccctgtctgaaagtctct

SEQ ID NO: 305 - DNA, 312 bp, homo sapiens
  misc_feature (147)..(301): n=unknown
ccctttggcgtgaaggagacgcatggctggaaatgaccaagcggttggagatctctttgccgcatacctgggaggcactgtcctgacagccaaccaagtatgcagaggacttcagacagggcatcgcctcccagggctgtacaagcncacccaagccatctaccggggggcgaagtcctgaccagatgcggggcgancgaccgcgcccgcganatgccaggaacccgttttacccccaaagtgggccagcggggcccggccttcgctccagcggcgcagagctgactcaggacgtgggganggaggaaaggc

SEQ ID NO: 306 - DNA, 321 bp, homo sapiens
  misc_feature (311)..(311): n=unknown
agcatattcaacatctggtatcaacaaggtaatgtttaaccttagactagccaaactagtgatgacctgcttccatgctgcatctgctgctttttgtgttgatgggactcagaaatcatgagaaaggtcttcagtgatccatgactgcaacaaattcttttcctaattgtgccgtatattatgcccctcaatacaacttactaatctctgcctcagtttctccatctgtgaaagtggtgtaatacttatctacctcccttgaatgttgtgaagattagtatatgttggtaaagcacttttaaaataaagantgatataaag

SEQ ID NO: 307 - DNA, 283 bp, homo sapiens
catatactaatcttcacaacattcaagggaggtagataagtattacaccactttcacagatggagaaactgaggcagagattagtaagttgtattgaggggcataatatacggcacaattaggaaaagaatttgttgcagtcatggatcactgaagacctttctcatgatttctgagtcccatcaacacaaaaagcagcagatgcagcatggaagcaggtcatcactagtttggctagtctaaggttaaacattaccttgttgataccagatgttgaatatgc

SEQ ID NO: 308 - DNA, 468 bp, homo sapiens
  misc_feature (303)..(461): n=unknown
gggaatacgagctttggagtcagaaaaagaattggaagaattaaaaaagagaaatcttgacttagaaaatgatatattgtatatgagggcccaccaagctcttcctcgagattctgttgtagaagatttacatttacaaaatagatacctccaagaaaaacttcatgctttagaaaaacagttttcaaaggatacatattctaagccttcaatttcaggaatagagtcagatgatcattgtcagagagaacaggagcttcagaaggaaaacttgaagttgtcatctgaaaatattgaactganatttcagcttgaacaagcaaataaagatttgccaagattaaagaatcaagtcagagatttgaaggaaatgtgtgaatttcttaaagaaagaaaaagcagaagttcagcggaaancttggcctgttagagggtctggtagaagtggaaagacaatcccngaactgg

SEQ ID NO: 309 - DNA, 370 bp, homo sapiens
gatgaagcaggttatactatttttcatcatgctgccctgcacaacagagtttctattatatgtcaactgtgcaatgctaacttcaaggtcaaccagaggcgctttgttacgttcagccaaggtaccataaagttttttaacctaaaatgttgttattttatttacccttactcagcattaggaatgcacgttgattttagagcaggttaaaatttggtattaactagagcaaagttgaggtttttgtttcatttatctaagaaaggcttcttttagttttctaagtatcacttatagctagcttatatggttttatatttgctcattgtgtctccttcatttgagtataagctctataagagggcaaaga

SEQ ID NO: 310 - DNA, 456 bp, homo sapiens
agatcctcttctctgacgttccaaagactagattctgtgcaggtcactcgcccttcagtgtgctcattttattgttttcttcaaacaggttgatgcacttgataaggccacagcttcttcttatcttaaccttgttttttggttaaatcgacagtgcaaagcaaaaggattaattccttcttctatactgttatgttttactaaggaaatatactaaatctgttttgctaatattagaaaaaacaaaaattgaattggattatttcatagcaaaggataggtgaacgtaatcaagtcttcttgtgatgcctgaatctagccttcaagttataagacgtaagcgtgaatttttcttagactgataatcatcatgattttgataagatcatcacatcatgatcttaacaaaacctgggaattagggagaaaaaggaaaatatacagtacaaatcaact

SEQ ID NO: 311 - DNA, 247 bp, homo sapiens
  misc_feature (4)..(4): n=unknown
agtngcaatagtaaaagaactctgatgcatcccttacccagactcatcaatggtttacattttgctccatttgcttttgcatcatcatcctccctccctctccctctttctctctctcatatgtatacacacttctgtgggatccatttgagagtgtatttttttacattcttttacctaaccacagctcaaaacatcagtattcttgactattctaaggcagatttattgtcttggtcttaaaatg

SEQ ID NO: 312 - DNA, 344 bp, homo sapiens
  misc_feature (75)..(75): n=unknown
  misc_feature (213)..(339): n=unknown
ggcactatagccctagccacaggctgaagggaccatgtgcctgggcgctcttggtaaatcggaacatgtttgcgnggcagggaaccaacagccgcgacccgctgcagaccccagtgtggaacttcagtgagggtccttggggttgcaagcgacagaaacacaactcagactagctgcagattagaaagagaatatccttcctctaggatctcngtgctganaatgtaccaccantttnacancgccgatngaaanggtgtgtttcctctgnanatccatatgccaacatatgggcatggattactccagtttaggacacatgcccaacccttganccanctctg

SEQ ID NO: 313 - DNA, 457 bp, homo sapiens
  misc_feature (16)..(16): n=unknown
  misc_feature (148)..(148): n=unknown
  misc_feature (384)..(390): n=unknown
ccctctcatgtgccanaccctgtactaagagttgaaaatccgctcatcagggtgttgtttggacaatctaacgtccttgctttggagatccactcggtgaggtcttgggagggctcaagcgcagacctctgcttcctcttcgtctagncaatcacagaacactccccaccagaggtggctcaaggggtgggcatgtgtcctaaactggagtaatccatgcccatatgttggcatatggatgtacagaggaaacacaccctttccatcggcgctgtgaaactggtggtacattctcagcacagagatcctagaggaaggatattctctttctatctgcagctagtctgagttgtgtttctgtcgcttgcaaccccaaggaccctnaactcncgtccacactggggtctgcagcgggtcgcgggctgttggttccctgcaaggcaaacatgttccgatt

SEQ ID NO: 314 - DNA, 245 bp, homo sapiens
  misc_feature (82)..(241): n=unknown
gcttagttgtttggctcatggattccctttgtatctacctgcttctgcctaatagcaactagctgttctttccctcaactcnnnnnnnnnnnnnnnnnttgcagttttgttttaggatatctggggtacttcacccagtcttgtgccaccctgtcagctgnagctctttctcnagcncnggaatngctnaaggttcccanntcaaantcntgagaacaagngaaacgnangggnttcttcntttt

SEQ ID NO: 315 - DNA, 420 bp, homo sapiens
  misc_feature (2)..(408): n=unknown
anttttggcatattactagtattaattatattnttaatggnagtaacttcattnaactaagctcanaaattagccatcaaatccattnatcttgtatttcttatcttggtgaattcttgatccaccttgactcctgacattcntnactcacnaggcctngatatatntaataaatcaccatttctgctggtgcncagtttattctaactcaaatnanctgntgataggcactnctaaaggggcaaagccagcctgacngttgagaccctaccagcnatcaggaacagctgatcgnaaaagncatggntctttgantcaagggcaatnagtccatgnatcctcagnncaatgtaggcngtggcntcatacancnaggaanaanncccatacgtntctcttgttctcannaatttgaactgg

SEQ ID NO: 316 - DNA, 288 bp, homo sapiens
gagaaatggcagactccctacattagcattcaggaaccccagtgacctggccccattgtgccttcctccttcgttcatttcccatggcatccttttcttagatgtcagtctcgctcctcatcctaaagttgcccaattgcactggcttcagaactacaattcacaggcaaccctgtggaggcatttttcccatctcttccccctcatcctccctgtcctcttcccctccttgttgcctttgtagccctcctcctcctcttttaacacagtccagataggtcttcatgt

SEQ ID NO: 317 - DNA, 252 bp, homo sapiens
ggaggagggctacaaaggcaacaaggaggggaagaggacagggaggatgagggggaagagatgggaaaaatgcctccacagggttgcctgtgaattgtagttctgaagccagtgcaattgggcaactttaggatgaggagcgagactgacatctaagaaaaggatgccatgggaaatgaacgaaggaggaaggcacaatggggccaggtcactggggttcctgaatgctaatgtagggagtctgccatttct

SEQ ID NO: 318 - DNA, 234 bp, homo sapiens
  misc_feature (225)..(228): n=unknown
ggagcatctaacgcctatgaagcaaaagaggttgttaatagactctttgaggatcctgaggaaaactaaagtatatactgtgaaaactttgagaagataatacatatgttcacgtcaatatacaaccatttggcacagcttcctgggaggaataataagaaaaacatgctttggaggaaaactcaagatacaaaaatgaatggctatgcataataacaataaaantgtattccc

SEQ ID NO: 319 - DNA, 517 bp, homo sapiens
  misc_feature (228)..(228): n=unknown
ggcttaagttgaaatgtttagtggaaaacattggttcgttaaaagtagcagtggatctacagctcttttttgagaatgaattgctattatgtttgctgtctacactgaggtgtggcatgaagcctttctctcgtctcctttataccttggtggatctgtgtttccggacacttttccttttgaaagttgagatcccgttcagaggctgacagacttgtccctagaagntagggggcataaatatgccaaatgcaaaaccacaatgatttctttgattacagggaccttggggccagcttgcggtaagaacttgcctttagaagatcctttggttcccatcagtgtctccctctcctcaaagggatggcagcccagtggacagtgggcacatgaccctgacatcgacagactcccacgggaggtaaagctgctctgtcagcgtcgccccagacagacgtgcacctttcctcatcagcccgaacctggcctccatccacaccttgtgcaacatgtggat

SEQ ID NO: 320 - DNA, 582 bp, homo sapiens
  misc_feature (134)..(134): n=unknown
  misc_feature (517)..(568): n=unknown
gctctaggggctccaggcataaactcaactgccaaacaaatacagttttcaacaggagatcccaatttaccaagagagtgttttttaaaaaaaacaagttaaagatgaacacaactccgcacacttgtagcacnttcagtagactgttacccaacacttatatgcactcaaagatggctgcagaaagtcagagactaagaatgtgcctgccgctcagtcaccagccatgccaacagaccagttttaatttcccaaatagaagatgagggcagaaacctgattaaaacaaacaaaaagtaataccaaacttggtacattactaaaccaagagctgaagctagaattcatttggtgaccttgagtttatgacctcctggcagcaagtgaaagttcattgtttatatggctgcctcacattaaagtggctgctgctcattcacacagtctccaaaagaaagggcaagggcaaggactgcggacagcttcacgttccccttggaaagtcagcacgccagtngngagacgtggnnaggagaagcacatgtnagaaccaggaatgacctttctnattacagccacact

SEQ ID NO: 321 - DNA, 475 bp, homo sapiens
  misc_feature (207)..(207): n=unknown
ctataggccacgctgtagccttagatactctaactcgtgaaattttcatcgaccgtcgtccatagggcaaggcacgcttctgccctctgtgggacagagttgtcgatgattataggtgcggatacccgcttcagcctgtgttaatcggggatgcagccccccacccttcctgccgtggttctacccagcctgctgcggacgcctganccaggtgcgtcacccccacctgggctgaccaggccaggacttcgtcgtccgcgggacgctggggggcgcctgccgactggcaccggcggctagctccgcacgaatgggaaatcccgggctccgtcgccaacctgttactgctgcagaacgccaggaagtcagcctgatcccacagatttagggtaaaatatcccggggggccgaagtggaaaccggagttgcgtcattgctcccaaccgatatcacttggcagcgaacgggctgacca

SEQ ID NO: 322 - DNA, 383 bp, homo sapiens
  misc_feature (30)..(371): n=unknown
gccagtcaagcaccacaaaagtgacttctnagtgttcaacctctttcagaggctcatgggacttgcaganaatgtcccaaggtattggtggttggnaatttcctcttatgcttttcttcccacaagaatcaccgctanctttcccaccatgcttngggcaagggganccttcctannactttcagtacaggtagngaatccatccatcagactggcaggnccnctanncgggcacttcntcngtttctcanaataaatggnccnttcccnagttcaagnnaacnctatgcctctcttctgtcnnnnntgtaagtctncccagaaagtngcnatgntagnnccagaatgnactgntgcagtggcttagnaancttcactgttgg

SEQ ID NO: 323 - DNA, 423 bp, homo sapiens
  misc_feature (47)..(47): n=unknown
  misc_feature (403)..(483): n=unknown
gtcttgcatgggcctcttcttttgtgcatttttccctccagcagggnctgaattattcaaacgtagtctcatgtctggattggaacaaatggaagagctgaggacaggagtgacaggagttctgcaggaattggatttgcaactcaaaaccaaaggctccccactgctgcaagatatttctgcagaaagatcaccaaatggagtacaattggagagaagcaatactgcagagaaactgtatgactctaaccattctggaaaagtcttcaatgaacacccatttcttatgactcacatgataactcacattggagagaaaacttctgaggataatcagagtgggaaaagccttaagaaagaactttcctcatagttttttacaagaaaagtcatgctgaagggnaaatgctaagtgtggttaac

SEQ ID NO: 324 - DNA, 465 bp, homo sapiens
ctagtaagatttggaaactggttgaaggctttttcatgtttaacacacttaggcattttcccctcagcatgacttttcttgtaaaaactatgaggaaagttctttcttaaggcttttccactctgattatcctcagaagttttctctccaatgtgagttatcatgtgagtcataagaaatgggtgttcattgaagacttttccagaatggttagagtcatacagtttctctgcagtattgcttctctccaattgtactccatttggtgatctttctgcagaaatatcttgcagcagtggggagcctttggttttgagttgcaaatccaattcctgcagaactcctgtcactcctgtcctcagctcttccatttgttccaatccagacatgagactacgtttgaataattcagaccctgctggagggaaaaatgcacaaaagaagaggcccatgcaagacctcgag

SEQ ID NO: 325 - DNA, 508 bp, homo sapiens
  misc_feature (483)..(483): n=unknown
ggcatttgtgaggaggcgcgaatcaagttagcggggggaagagtcttagacctggccagtcctcagggtgagggccctgaggaagaactgagggacctcccaccatagagagaagaaaccccggcctgtactgcgctgccgtgagactggtgctccaggaaccaggtggtgacgaactgggtgtgaggcacacagcctaaagtcagcacagcagaggaggcccaggcagtgccaggagtcaaagcctgttggatctcatcatccatatccctgttgatacgtttacctgctgctcctgaagaagtcgtcatgcctcccgttccaggcgttccattccgcaacgttgacaacgactccccgacctcagttgagttagaagactgggtagatgcacagcatccccacagatgaggaagaggaggaagccttcctccggcttctttccactttgtacttagtattttccccctcttctttcttcanatcctcttctctgattcttggtggt

SEQ ID NO: 326 - DNA, 117 bp, homo sapiens
tggtcagtagtttcatttccttgtcctgcttattcttttgttcttgaaaattatatatacctggctttgcttagcttgttgaagaaagtagcagaaattaaatcttaataaaagaaa

SEQ ID NO: 327 - DNA, 281 bp, homo sapiens
  misc_feature (15)..(273): n=unknown
atctgattcattagnnatctaatcttgcnatataaantgggtgcattaagcatttgtagtatattaagcctgggagccngaagtttctttncagcgttcttattaagnttatnatgnnngaaacttttcaaaatcnttaatggnnaatgatgtcccaattcactcttttctttttgantttagatgggnaatgtaaagtcataanatcgataggttgactgtnacaactatgtttacttacanagtgaacaggaaatgagaatgggtgatnnnggtctctg

SEQ ID NO: 328 - DNA, 242 bp, homo sapiens
  misc_feature (77)..(237): n=unknown
tacatagatttcacaatactatggaatacttatatttagctaaagtcacaaacacatttcaacattcaaaatgatgngcatcnttancattctaatctacaaagctcatgaataaagaaaaatacaaaaacctcaagttttacaaaaaaaaaaacttttaagggtacatacattnccaatnaaaccatttctnccagatnnnagggaaaannnnnnaggcntaccactgnctttttntttcc

SEQ ID NO: 329 - DNA, 381 bp, homo sapiens
  misc_feature (18)..(37): n=unknown
tgcttctggacggaagtngtggctgtggaaggcgtanatccatcctgcagacagacaataattctggagatactggtggaagttccaagtccaataagacactcaaatatgagtacaaatgccttaaaatggaattgaaaaactctttattttcccctatcatttattggatgggtgggtggggtatttttttgtaattgcttttttaaatattagttaatggattaaatttaattcttcagcgtaaaatggtgaagaactagcatatagccattgatcataaactgactatcataaaatcaaaacaagtgaaataacaaaatggacatggtggctttgtttaggtagagccacaaaagaaaagcttgtaatattttatat

SEQ ID NO: 330 - DNA, 467 bp, homo sapiens
cgctgctttccccactctctgtccccatgcctcctgggcctcagggtgcagtcaagccctgtctgtctcgaggcttcctcctccctcccgttccgcagagctgttctggcaggggcctggagtccagagccgcagcttcgtccctttcggggggcctcagatcgctctgctgctgcccttttcctctggagatctgcgagaagggtgaactgagataatggatgagaaagcatgttgaaaaccacagccggggcttttctctaaggttatcgagtacgtggttctcagggatccaagaacagtgatggacaaggcaaatgtgagccagtatggtcatcagtagctctatattgattatcagccagatggcctaaaagatacctgtctcaatattactagtgtatttttcaataaaataaaccatcactatatgggtatcttcttggtagtcacagacattctatcga

SEQ ID NO: 331 - DNA, 547 bp, homo sapiens
  misc_feature (375)..(544): n=unknown
gaatcagtagtcacatcgtctcaaataaagcataaactgtagatttatccaacagtaaagtccatgatgaaacaaagtgatacagtgatgagtgccccaattcttctgtaagtgggtgatggtgtggcctacaataaatgttttcctgcttattattgcagggtggagagagagttagaatgaaggcgaagtttcctacgcacataaagctcagtgagaaagcaattccaagagtaatggaaggaaaacgactctcgggaattcagtttgaacactggcgactgagcccataaacatctttctggaatgaggtttgcagaagaaagcagcggtctaacctgtggtagcctgtgactctgacattaacaccagagnnnnnnnnnnnnnnnnnnnnnnnnnnnnnnnnnnnnnnnnnnnnnnnnnnnnnnnnnnnnnnnnnnnnnnnnnnnnnnnnnnacactagaccctctggagcagaagctctggggttgaggcccgcaatctgcgctcccatgccctccangcgattccagcacaggctgangtt

SEQ ID NO: 332 - DNA, 404 bp, homo sapiens
  misc_feature (87)..(87): n=unknown
atatatatacacatatgcaatggagtaatgaaaatactatataataaatataaaatggattaaaactatataaaatagatgcatganatggctacatagatatggatgtttgcatataggtacatttagctggattaagttagatttaaatggtccaatagagaactgtgcatacaattacataggcaaccacaaatcaaccctttctctgggctatctaaaataatcaggtactagaccaaaaaatgacatgctgtctgccttaccttttagtgatgatttgtaggaagaggaaggtaggggctggtgagtggaaaaagtagtagagtttgtgagggaatgtctgtatgtctgaagacaaagtctgggagattggtgggcccagaaggtgtgaatctactctg

SEQ ID NO: 333 - DNA, 407 bp, homo sapiens
  misc_feature (20)..(400): n=unknown
gaatggtatgagaaaaccanatggtcttagnatatatatngnaaccaaaaaattacaacttgaaaaaattccgtatatgacntgggantangnnaaggcatggattnttganttaacantctaacagatgcttcantataaacacatacggttgtttgaaaataaatattcagcgtcaacttnctcccatagagaaagcaactccacagacctgccgaaatcacacttngaatctactcaagncttggcattgcctcttagcaantngtncctcaaccatttctcttataaacgtgtgtaggacagnntcagngaacnaaagtganctcatgtntcnnctatntcngaagantnagnaagnaggggnactaaattnntngcagcaanctctatgaccannggatgga

SEQ ID NO: 334 - DNA, 522 bp, homo sapiens
  misc_feature (173)..(329): n=unknown
gttgttgggaaatcctttagatcattagttatgcagcaaaattgcttggctttaataatcatatgtactggcttattctttctgaaggtaagctacttcggaagcacaactattgactaaaaactaaaccttcgaaagaaatgacagcattgctagttttttgtgtgcgtggnnnnnnnnnnnnnnnnnnncgtggggtactgtattaaggttagtttccaacaagaattgatgtaattagaagaaattgacttccttacctattgcctctgatatttacttgcttaaatttttttttattggaaatccagaanaagtggatttagagnacaacactaactcccacctaatctatgacagagatgtagaagagagtacctgtgaaaaatgtgaaagtatctgaaaaatgtaacctttggcagcctgagcatagtcaaccagaaaaactatctgaattaaaataattggtccataggtactattttatttggtccataaggattatttttcaacttttttttc

SEQ ID NO: 335 - DNA, 566 bp, homo sapiens
  misc_feature (22)..(555): n=unknown
acttcttcctctcttatctcanattnnagatagttatcaagtaagatctttaaaattttttgnntnagcttctcctttatgcccactgtcactaccatcttagttcatgatgttatcttcagcctagattatggcnatagcttactaatgattatccctccatcctaatgataaagtggtcttttaaanntgttactcccctgcttgaaatctatgatagtttttaagataattccaactcctaagtacatacggtgctttatgatctgggtgcccatctagtttcatcttctgtctcttctatagancatgttctctactgcacataaaatattatatggataacatatctttttctcttccctacttggaatattcttccttataatatagcccttcctttgtcttatctgctccctacccttcttttatacctctttaagcacatagtnaccattatccanccatatatctaacattnacttatatttctctttnattagactacaaagctcctcaacgagtaaggttaaaggtggaaaaagcttcaggtancagtaacctac

SEQ ID NO: 336 - DNA, 479 bp, homo sapiens
  misc_feature (398)..(411): n=unknown
taatatttaaaatctagagaacatgaaaaaagggaagaaaacaaacctattttaaagcttacgtgactactttttaatgagttcaggaaaaagatgatgaaagttattgggtattcccatggaaaagagaatagagatggtaaaacttcctttctaggaagttaccttctaggaagccacagagttgccatccttcttactgtccagagggaaaattctagagttttctgaatttgcactcttttgactttgaagcagaacaaattaagtttcaactgacccaagtcctaaggatactaccaacctgcttatttaaaatagttgcaaaccatgaatttaaacacttccataaagcctaattcatctccaccaattcacaaaaaaatgccaagaaagcntttaccacatgcnatcactgttccaaagatttagagaggtttagaagagtgattgtaaccacaggcttggcgccatattgc

SEQ ID NO: 337 - DNA, 500 bp, homo sapiens
  misc_feature (6)..(20): n=unknown
  misc_feature (409)..(485): n=unknown
tccttnanannacttttctngggaataaacaagactgatacaataatggcccaaactaatacgtacagggcttctatgccccatgaaattgactggcattaggccgtgaaatccgaggtgatgataaacacttgaaaggtggaaagttcttaagtgtatgactaaatgactcactggcccgtgaaacatgcaactattttagcaaagggctagtttctcttcacatatacttaaaagcagttgcagtgagacttcagtggagggtattatagtgcaaactaagaaagatcagctcatgtttaaaagaaaactgagtaaaggaaatctgcatttatggaaactgaaagctctaacactgactcattgaagaagtctcccgaagatttataagtgtaatcaacaaggctantctttgtgacaagcatttgtcatccccgatataagaaaaaacaattattggaaaacaaaantgccacagggattgncccattcccagtatt

SEQ ID NO: 338 - DNA, 490 bp, homo sapiens
  misc_feature (15)..(53): n=unknown
  misc_feature (236)..(236): n=unknown
  misc_feature (341)..(341): n=unknown
aaagaattagtttanattttaatttttctattttgctgagtgaaaangtatgncttttagtggcatgtgttaacttgaccactcttgaggaccagaagcttgtcacttgtgtatttttcttagaatgtagcatttgatacttttaattggaaatttggtggtgcttatatcttgttttacatatgtatgggttgctgaccagtccagattttttgtccatttttcaggaaaggganaagataaaacagacttggataacttttgtttggaaattgtagaagtataatgaaaaattacctgtgaaggaagaaagtgatcccctcattttctgatctcatatntttcttattttccgtgtctttctcccttctagtgtctgagagatttcttcaatttcaaactcttttacttctgctacctatcattttaaattttgatttaaacctttccctggagggtttctatagtatctggtctacttcatggatag

SEQ ID NO: 339 - DNA, 424 bp, homo sapiens
  misc_feature (16)..(64): n=unknown
  misc_feature (333)..(402): n=unknown
aaagcatgaagaaganacaatcatttaaaaacaccanagacccttacatagcaaaggttaaganataaattaagactcctattgggttgtgtctgccagggaggatacaggcctcattcgctccggtccttgggttcccggtatttccactggatgtaatcaaagatgtctttttcactatccactggcaggggttctcctgcaactccagtgactcccaagggacggatggtgtactcattgattgtgaaacccttttctagggcatgagccctcatattcttattgaaaatatcactcccagtgcaatagagaacaccacagtactactgntctttgggtatcaacctaaaaaaaatggacagtagatacntttttttaccatgcatttcaagtttagcnaatataggactcctaaaatcaa

SEQ ID NO: 340 - DNA, 222 bp, homo sapiens
  misc_feature (46)..(207): n=unknown
gtgtggggagtgtggggaaggcccaggctctgtgtgcagaggaggnaggnccaggctctgtgtggcgaggaggaaggtccaggctctgcgtggggagtgtggggaaggcccaggctctgngtggggagtgtggggagncccangctctntgtggagangagggaggcncangctctgtgtggggagtttgnggangnncangttttntttgtggaggaggaa

SEQ ID NO: 341 - DNA, 570 bp, homo sapiens
atgttaggataggagagggagcagcaaggagctgtcatgactgaccccgggtgtccctatttcttcccagggctgcacttggggcgtggcataccaagtgcaaggggagcaggtaagcaaggccctgaagtacctgaatgtgcgagaggcagtgcttggtggctacgataccaaggaggtcaccttctatccccaagatgctcctgaccaaccactgaaggcattggcctatgtggccaccccacagaaccctggttacctgggccctgcgcctgaagaggccattgccacgcagatcctggcctgccggggcttctccggccacaaccttgaatacttgctgcgtctggcagacttcatgcagtctgtgggcctcaggcgcaggacgagcacctggcagccatcgtggacgtgtgggcaccatgttgccctgcttctgccccaccgagcaggctctggcgtggtgtgaggggttgagcccctgcggggagtgctcatgtggacatcagggcaagacacccactccagtgcacaagacagattgcgaccgttgagcccactgagcagata

SEQ ID NO: 342 - DNA, 533 bp, homo sapiens
  misc_feature (21)..(521): n=unknown
agactgggaaggttgccaggncctgtagtgatgagcttcccaggaatagaccaacacacaggcaggagtggcccagacagnnnnnnnnnnnnnnnnnnnnnnnnnnnnnnnagaaaacaaccaagtgggtaagaggcccaggccaggctcagcagctgtgtccaggcatcagctccagctctgctctggggaactggtggaggagaagggctggccggggcctcagtccttacagggctccttctcctcatgccctactatccctcatccagcctgctgggatccttggcaggtggaattcccagggctctggatggctgggctgagtgagcagaggatcgaggctcttggagactccctggggaggtggaggcctgggtggtgtggggttagcagcagcactggggggaatctggtcaagttccaggatggggccactgctcagcagggcccctgtgtccagggcaggccctccacctgcccaccacaacaacatggtgcaataaataaagtttcaagtngtaagtcagtgt

SEQ ID NO: 343 - DNA, 483 bp, homo sapiens
  misc_feature (463)..(470): n=unknown
gatttttctcttttagattgtgtttacctttttggagtgatttcaagtggggaagacaaaatttcaaattagattttctatcaagaataatttttcaaattgtttcattttaggaagtagtcatgccccacaagatgtcagtttgtcatatccccaacatcatgttggaaattcaagccctacctccacatctcctagcaggtaatatttctcacttattgttaagatcatttatcaggaattcttatagggaatagcctcaaaacacatgagtaaatagtctccttcattattctcttatctcttcattctgccgttattacttgccttttggggttgttgttatgtatctattctaaggggtatagaatgtgtctattctatagacaaacacattgtatatagtccccttagaatagatacgtatataactatttgttgatttgtagcgacataaccatanccacatntgtgtacagtaac

SEQ ID NO: 344 - DNA, 361 bp, homo sapiens
  misc_feature (305)..(305): n=unknown
cccaagaaattctaagagggaaaactttttattttcctctacctaggatgcctttgaagactccattaaaggggctggaagtgctttaaatgccaactttaccaagaaatgtttaaacactgttaattaatttcagctggcaagaaagaacaccgggagggtacactttttgcactattgctggctcactattccactttctagtatctcttcatatccatccacttctctccagctcatggcaccaccttaatctaaactatcaacctcatccatcaatagcttccaacatcaatgccttgctnccaaaagcttcctcactgctctattttcaatcttgcccctccaatccattctccca

SEQ ID NO: 345 - DNA, 603 bp, homo sapiens
  misc_feature (46)..(46): n=unknown
  misc_feature (602)..(602): n=unknown
ctacttcttaggcacacaaatagtgggtgtctccttggaacctganacaaaactatcagtgctaccaagccttgtaaaatagggaggaaactaatatttcttgagtggcttctgagtgcctggtgctttcgcggctctctggagagattccttgccctgatggctttggtgtgtactcctctcccaggacttcagcactgagattttcccaaccccctggctttttctcaccttgggttgagttgatccggcactaccacaaaccccaccatctgcaaaccaaccaagattaggcagtatgccctttccgtcttgcactgctcttccaaaacttccatctgtatttctcacaccctcagtaagcaaagtgagtgtgcatggacagagctgcatccactgctttctcccagcgggtgcagtctaatctgacacggggaacactaggagtttagcggaatcttcagccaccctattaatgtgttacgcattaggcattgtagtggaaactcctctgatggctcatgactatatgaacaggagcaatttggaatataacatgtcagctgtggactgggaagtgccgtgagagaaaacactacctng

SEQ ID NO: 346 - DNA, 483 bp, homo sapiens
  misc_feature (86)..(477): n=unknown
agaagggagggcagttgcccatggaaggtgaagtgaggcacaatactattgggttgcgggccaagtacacagggttgcactgtganggaactgaggnggttctgggagggcctggtgacaacaatggatttggggagatccacaaaggaaattttcatttcctccccaggttagctattcagtgggtggantatncagtcttnttagcaangtcactgctccttagcnacatcaacaanagtgccaaagctgangacacagagnatnccatcattgtctttngnttctctnnangcctctggaccntgttctcatctgtaanngagccangaaccaatnacgtcggaagnnaagccttttcatgtcngattcnntgacctgcaaactgcannnatcccancnngctccagaaaaacacggcagttngaaacaagggaatgtgggtgttaggtgnaaaactgcngagctacgggctcntgatga

SEQ ID NO: 347 - DNA, 530 bp, homo sapiens
  misc_feature (33)..(46): n=unknown
  misc_feature (498)..(528): n=unknown
tttaaaacaaaggaaaatgccactttgaaagantactgttctgacnttctctttttaaaaattccttctcataattcctacctagaataatgtgagtacttaatagagatttagtaagtttttggtgactttatattctgacgcgctttagtttacaccataaagcactgaacagttatttccaaagaagtgtaatattgtagcatgctgtcagtatttttaaggattttctaatttgccaggtacctgagagcagaaaccatgattattacacttattttctcccagctgtatctcttagccagtgtctggcatataactgacactcactaaatgtttcatagaaatacaagagtaggcttttgtttgttttagtttgcagatacatttctgtttatgaaaatgctcaagttttcttgagatacagattttttgtataaaggagtgtctaggttgtatagaatctttcatttcactatattataaccaggtgattanagtgacaatttganaccaaatttaaacacnat

SEQ ID NO: 348 - DNA, 513 bp, homo sapiens
  misc_feature (29)..(31): n=unknown
  misc_feature (307)..(307): n=unknown
  misc_feature (427)..(462): n=unknown
aacaatatattaatagagaaatagcacantncttattcagcgcctaaatttttacgagcgaaaatatgaaattttatttttatgcatagtttatgtattgatccatggggcttacaaatagcaacacactcttgggctgatactatcgtggattttgcttaaattatgagggcaggaaaattttaaaatcccacaggtcacaactgaatcacattaactggctgatttagtaaatgaagggcaattctaaaatgcaaaataaaaatggaattaaggcagctttaaaagaaaataaaactcatccacnccaaaatagtgctacataattcattacttaaaaagctctctgtggagtatagacataaagccaaaaataaaaacaaacattgcagttgtgatgcagcatcaggtgcttttacttcagtgnatgaaaaataatggtcacaactcaaatgaatgggntttaatatgcatatatgcaccttaccagagatgtttgctaccaatgatatc

SEQ ID NO: 349 - DNA, 393 bp, homo sapiens
  misc_feature (61)..(61): n=unknown
  misc_feature (287)..(384): n=unknown
gtggtgtaaatgccaaaatgaaaacaatcctaaattatctgttccataaatatacctattnaaatttaattttatacaaaacacagactgttaacataaaaattaagactgaagttatctttaaagtaatcagaatactttttggtagtctgcaacatacatataaatttactgtataatttctggttttttaatttgatttttctgatttttaaaaaattagaaaaatgtgtttataatttgttatgagattttgaaatttaaaatatatttagctgtaattttanncattgatatgtgcntatttgttgtcacattcatgtatccatccttttgccttgnngttttcacttttatagcngtgcntcagtagtataaaaggnnataaaatgt

SEQ ID NO: 350 - DNA, 370 bp, homo sapiens
  misc_feature (158)..(247): n=unknown
ggaagtcaacatttaataagccatcatccacaattgattaaaaatgtttaatccttaaattgtgcatcaatatcctatgactccaaattttatttatcactctccttcaagtctgaagaaaatgattaatttgctaagttccacagacagtacagtcncactgncnnaacatttagtatgatgtcctactctcatattagaattaaggacagccagtatcaaactggcctgaaacctgattgtgttnctggttcagaatacctgtagtaaatctgtaaatccacaccaagacacaacattaaactagggtgtgtatatcttataaaaaccttttcacagtaaaaatcaacattaaattttccaaattcaa

SEQ ID NO: 351 - DNA, 363 bp, homo sapiens
  misc_feature (256)..(256): n=unknown
catgtttttttaatggaagcagagaaagcagtctcggacctttgcagtggttcaggtgattagtgatgggggttaggaccagggacgtatcgatggaggtgttgtgaagttgtcatattttaaatatacatttcagagccaggtgcactcgctgatacattggatgtggcatattagagaaagaagactcgaaggtggcacctagtcttgtgttctgagcttccagaatgaggcatctagaagccaggacccgggngaagcacggaaggagcagtggtttattcagtctgcagaagcagtgcctacaggactgctgtgtgaaagaggacacatgtgatatgagcaggtgaaaatcacacagca

SEQ ID NO: 352 - DNA, 352 bp, homo sapiens
tgattatcatattcaattttaacagatgttttccattagatccctcaaccctccacccccagtccaggttattagcaagtcttatgagcaactgggataattttggataacatgataatactgagttccttcaaatacataattcttaaattgtttcaaaatggcattaactctctgttactgttgtaatctaattccaaagccccctccaggtcatattcataattgcatgaaccttttctctctgtttgtccctgtctcttggcttgccctgatgtatactccagactcctgtacaatcttatcctgctggcaagagattggcctcttttcttgtcttcaattgggtttc

SEQ ID NO: 353 - DNA, 473 bp, homo sapiens
  misc_feature (414)..(414): n=unknown
gttgctgttatatatcatggagatggtgaggtcaagaatgacagaggctgaccattcagcagggctcaccatgtgaaggccggggtttgtcaccacattgaaagccacatctcttgacttggttggtgaacttagggttaacctgatagagtactgaccaactcaacctatcccctcttaaaccacagatagaaacaattactctaacttttgggtcccttatacatacttatgtcagagcacatgtaacactttttttcactttatttacatgtttgtctcttattaaatcagctccctatgggtaggaaccttgtcttaattatccttgaatcctcagcatttttcacagggcatggaacacagtagacatttaataaacatttactgactaaatctgagaggaagaggatnctctctcaatatcagaaaaactacttgccacacgacagttcggatcttagtccacttag

SEQ ID NO: 354 - DNA, 423 bp, homo sapiens
ctgaatataaacatgaaggcttagcattcattatatacaaaaaaattcttcaatctacatagcatcataaaagccaaatatgaaatacttatgttgcctttcacccaacaaattcagttgatgatatatctttctgaaaataatacatcccccaaaactgcagtacaattttaaagaaaaataaaatacatgtttatattagtttcagttttcttgtttgtatttttctgtgttctaaattttttgcaatgaaaatgtgttactttataatcagaaaaaaatactatttttaaagaatgtagtggatgagatcatttgcaaatgtttacctgaggaaattttgaggacatcaagatcaatcaaggtgattgggagttaataccagacagaaatatactgtccttggaaatatgacacttcttt

SEQ ID NO: 355 - DNA, 549 bp, homo sapiens
  misc_feature (31)..(48): n=unknown
  misc_feature (458)..(540): n=unknown
gtttgttattgttggagaagaaaaggctganacccaattataccctgnactctttattcgaccaagacctcaaaagatgtcaaagaagccatttctccaaagacagcaacatctattgtgaggcactttcatattcagcagtctgtaagtttgtaggagaaaacataagtggttaatttaaaataattttgggctctaaaatggactttgttgccttttttggtgggggtggtgggaatcggattcagcccatttccaagggatagtttcttcatctcagacaactattttgtgatcctttttaaaagacattctgaaaactttaactcctgcccttcttccgtattacagttgtgttattccagaaatattgtctacttttttaatatattagattttcattcagatcttaaacatgcaaacatgtgataggttagctttttaagggagttatcagnaccactgtatctaaatgttaggtaaatgggtagattcncttgaagtggtatttccntggcagacagcactgtatcatgctcntcaccaagc

SEQ ID NO: 356 - DNA, 551 bp, homo sapiens
agttaagtaaagtcagttaagggcggtacacatgtcagcttggaaatcaactcagttttcacatgagcactccattttctcccttctttgacacccaacaccttattattctcttcatttttcattttatcagaaccgtattttggggagaaaataatccactttaaaagaggaaagtgcttacaacacaaaggcttataaaaataaatattaaaataaagaaatagatgtctattagttggaaatcatttattgcctctataaaagtttaaataaaaactctacaaaaattcacattacagtctgatgtggttttaaggtgacagtatatttcagaggtagtactagtaaaatgggatgcaggattgctaaaatgaattacttaacaagttaatgcaaaataaaatttcagtgtggagcaatatacactcagtatatattttaatgaaacaattttaattatatttgcttgaaaatatcactttactcttttttccccctagcaaatctgttccttaatcaaagtttgtttttcagcaatggtgtgttga

SEQ ID NO: 357 - DNA, 560 bp, homo sapiens
  misc_feature (46)..(46): n=unknown
  misc_feature (502)..(502): n=unknown
agcaccagttgatgctcaatatacatttgcagactacagaagttangttcatttagcgcattggcagagtgtggacgctccacctgacactaccgccttccctgcccctttgcaacagtgtctcttggcttctctttcaccatgctctcctggtttccctctcatttctgtgattgttgcctctgaacttccttcactggctccttcccctcctccctattcctgtcccttcaaatgtgggtgttcttggggttcactgacccccgttttttctgtttgccaactctcagttctgtctctagccgagccttcttttctgagcttgactctcttgctcagctgctttttggagatcacatctaaaatcaggctcaccatctcccccagaatttggcccacaccgttttgagagttgaccccttgcaggcatcgggctaaacattgtctcagttaatccttcacaactttatggttgtagaggaggaaactgaggcttggagangtagagcaggattgagccttctcacacaaatcaattctgtggtctccatcatctctca

SEQ ID NO: 358 - DNA, 305 bp, homo sapiens
  misc_feature (3)..(159): n=unknown
  misc_feature (301)..(301): n=unknown
canggagtgctaaaggngtgttccagggcaggatgaanntcacttgtactatgtcagatatggtgcaaganacagagagacattgatggatttggagatagagtcaacntgagnttgtgaccagctcaggatggagggctgggaagagtcagangtgcncctgcatttccagcatgtgtgagaacgactggggggcagtcacaggaagacaggaaggatagcccacctcattcatcgcttagtctacaaatagtcattagtatggaatggactgtggacacaggccctaaggatataggtntgcc

SEQ ID NO: 359 - DNA, 358 bp, homo sapiens
  misc_feature (39)..(351): n=unknown
atagattacaaatataatacagatgcaatgacgactgcngtggccctcaacaatgtgcagttcctggtccccatcgacggangagtcaccaagctccaggcagtgctcccaccagcagtctggaatgctgaacaacagagaatattgtggaagattcctgatatctctcagaagtcagaaaatggaggggtgggttctttantggcnagatttcagttatctgnaggcccaagcaaaccttctccattggttgtgcagttcacaagtgnaaggaagcaccctttctggctgtgacnttgaacttgttggagcnggggatcgattttcatccatcaagaaaaggtttgctgnaggaaaa

SEQ ID NO: 360 - DNA, 318 bp, homo sapiens
  misc_feature (310)..(310): n=unknown
ttacttaaaaacacattgttatattcatatgctggataattctcagtttgctgctgcttactctccattgattttggtgtcataaattccatgtttcatggaatttagaattttgcattttctattttggtttcaaaatcaaattggatacctttacataaaatgagtatatttagttcgttcaaagaaacttcaacaccagactgctgtagggggccaactgagagtttgttgaatagtaagaattttcccatggtaaaacaaatcattttggacatctcttggtagcaagcactgatagaggagtacnaagattaa

SEQ ID NO: 361 - DNA, 463 bp, homo sapiens
  misc_feature (426)..(426): n=unknown
gggagagaaaccctatgcatgcactgagtgtggcaaagccttccgagaaaagtcaacattcactgtacatcaaagaactcatactggagagaaaccctataaatgtacagaatgtgggaaagcctttacccaaaaatcaaaccttattgtacatcagcgaacccatgcaggaaagaaagcccatggaagaggccacactcggaagtcaaagttcatggcacattagagagctaatcagcagtatctattatggacactgaaagaaagttgtgtcaattttactcacattttaaaagtatattttgacttgtggtttaaatatgggagtaaattcagcctttcttcttttcatctcagtcataacccaaaagctacgggagaaaaagcagaagtgtaatctctgtatctgacaaaattaggagccanctgcaaccctaatgagagggtgcacaggcagaggaat

SEQ ID NO: 362 - DNA, 502 bp, homo sapiens
  misc_feature (21)..(49): n=unknown
  misc_feature (487)..(487): n=unknown
cttctcccaagtcagtaaatnngggcagctgtagggctcttcacaaggnaaagtcccttctcttcccccagcatgccataactgttgctcccatcagtagactactttctaaaaatatggcttgtctgagtgactccttctcgaggccccagcctgtttctcctcagaccccaaatggtctaggaaacatcctacctcctacctgcccacgcactgttaccactgttatatctatggttccgcgcctcggggtatatcccgaacctcagctaagagtccttaccagtgctgtcttgcacctgcagccttgagcactctcactctgaaatctcctgcaccagtgcttcatttcctctgcctgtggagccctctcattagggttgcagctgtctcctaattttgtcagatacagagattacacttctgctttttctcccgtagcttttggggtatgactgagatgaaaagaagaaggctgaatttactnccatatttaaaccac

SEQ ID NO: 363 - DNA, 398 bp, homo sapiens
  misc_feature (8)..(371): n=unknown
gggaaccntattggcaatgtttantnctntngtaatnnatgtcngtttgaaatctgtctgtncancttgggttacttgaagatgctttgaatctggnatggctcttactgcatatcatggggcagctttgagtacctggtagtctcanngttttggnaagttcngagactgctgtnggtatactgaggaagatctgtattcactgattacacaagccaggagcgacaacgaggattaacgtggttacctagtatgcatgcctttctggtgtattgantttnnagaatatttctnnaattnnataanacctatgagcntattcttgggataaattgatttatactgnagactccttgcaatgaaacagtagnattctgagcatcaccctgagcacagat

SEQ ID NO: 364 - DNA, 448 bp, homo sapiens
  misc_feature (19)..(19): n=unknown
caataacctaagctcagtngcatgaatccacactgcacattttattagcagtgtaataattttctaaaagattagtatcacagatgcactgatataagaatgctttgaattctttgagttctccagaggcatattttaagcgtcagatacaaactttacttttccaaataatgaaaaccaaggcagttttcctgaaagtaagagcatctttaattaattctaggtaagcgattctgaaggttagccagaagaggcaggtataccttaggggtagtggataatctccaaggtttggtgagtactagcgtgtgtgagtctgtgtgtttgcatactgtttctgaaaatatttgggaaaccttggggagaatccccctccattgagagttgcatcactgggagctttcttacccaggagagaggatatggaggcagaatttagggtgagact

SEQ ID NO: 365 - DNA, 389 bp, homo sapiens
  misc_feature (79)..(386): n=unknown
taaatcttcaactttgctgaattgcttattgaagaaaatgctgtctctaaacataacattactggcagctggaagtganacttacacattatgcttcatggtatctgagagtcatgaagtttacaaagacatttctggtcttattctgataaatatcacatgctagtatttcctacattcccatttactcagtgttccctacttcctaaaggagggaaaagngccgtcgaacagttgtcaaattnncttcacaaacagcttggttttccttaatggatganatcacccttcgttgatggatccatttgcacaggnatttctagatcatctcanggntcnnactctgggtcccacctcctgntnngctaaaaatggntaggtatctntat

SEQ ID NO: 366 - DNA, 399 bp, homo sapiens
  misc_feature (160)..(394): n=unknown
aaagttatatctcaaatatccccttttaaggtacgtttcagggctcttgtcctaaatggattttctattaaatatcaggctttttttttctaatgaagtatatataattatgaatcgttgtccaaaggatgtatttgttcatctgccctgaatgatagancaatgaatgaattaaaaggaactacatttagaaaagcaggataagtatgattttagaaaacttgaaggangaaaacaagaaagaagggcacttgtagagatgtgnaggggcagaaaacagaggtgaaagggtttcctgnacccangtctgtagtaganancactactgagttanagttctctaagcccatctgggatcctttggtgacagantnttgctctagtggnttatganatcac

SEQ ID NO: 367 - DNA, 428 bp, homo sapiens
taatttgtaattctagcacagtcaggtaccacagttacaagagttctatgttccactgaataaatgccactgaaaaaccattgaactcaaccacttccttccaattttctagccactggagttagaaaatactggaatacagtagaacagaggggtcaagacaagttctggtttgtcaataactaactttgaggcttcaggcacattgctccaactcctctgagtctcaaagccctattggtaaggtgggggtggcaatatctatcactcagcactattgtgaaaatttaaacaacataattagtatacattacccagcacagtacctgatccattatggtactcaatacaccttaatttcttccctttagttccccttcttccattaagagacccaaaggcacaagttaagtggaatcatttctgag

SEQ ID NO: 368 - DNA, 394 bp, homo sapiens
  misc_feature (362)..(362): n=unknown
gtgctatcctagaatcaaggatttcagcaacaatgcctctgttcaaactcccagaaattgatgatgcaatgcgcaactttgctgaaaaagtgtttgcctctgaagtcaaagatgaaggaggtcgtcaggagatttccccctttgatgtggatgagatctgtccgatttctcatcatgagatgcaagcacacatattccatctggagactctgtccacctccacagaagccaggagaaaaaagcgtttccaaggacggaagactgttaatttgtccattccactaagtgaaacatcttccaccaaactgtcccacattgatgaatacatttcctcatctccaacctaccagaccgtgcctgantttcagagagtgcagattactggtgactatgc

SEQ ID NO: 369 - DNA, 534 bp, homo sapiens
gcaattaaattgagttcataacaccaggtttcatagcgataggccatgcggatttgggctacatttgtcctccggatatcatttccagcagggccttcctcaaggtaattgtcgcccagaaactttactttctcctcatgagaaattccacactgcaagacactgttccttgccacttcgcacatatcacaggtgctcagcttgaagacttgtgcagcaatagcatattcttccattaggggctccttggtaaagtggaattgcattgggtcatctgtagacagtgagatcattagccctttctgaaggaaatccaaaaaaggatttttggcatactctagaaataggctattgttacttagtggtgacatggcgatgggaatttgggctaagaaaaacaagtactgtagcacgggactctttttaaatttaggccatgagagatatcatctgctatcatgaatgctgtcatgagatgggtgaaggctccagcttctccacagtgaaggtcggaacagaacgtattcatggcct

SEQ ID NO: 370 - DNA, 265 bp, homo sapiens
ctgttcaaggggattccgcccccccatgcttattcttttgagctctaagtaagacttaaagttctttttgcaagcaaaatttcctcacttttatagggtttaaatgtgcaaggaaagttgcagaaaataaaggagttaagtatttatgcctgtaaagttggaaaaaacattgtattttacaaccattgccacattggtgtctttaccttcaaaagtagtttttaaaatagtaatatcttggcggaagtcaatatctgatttttct

SEQ ID NO: 371 - DNA, 110 bp, homo sapiens
  misc_feature (5)..(110): n=unknown
ttttnagnnaaccaaagggcaaataaaaactggttattaaagctttctaatacttgaaggccacnaggntnaccaggntnaagaacctcgatnntgaattatacntntgn

SEQ ID NO: 372 - DNA, 436 bp, homo sapiens
tttcagtgtagtgggttgtcatgggttaaaacgttcagattgtcatgggttaaaacgtgaattggatatgaggaagtggagtgcacaaagatagttttctgaaagttttacttggaagaggacaaaaaattgagacgacagtttgaggaggatgaaaggtcaagaattctaagctagtgataaaaatttcgtcaacatcaatgaataggtaatgtaaacacattaatcctgggatggatgtgagaagagcaaagaaaggaatcctgggggaatatcagctctaaaggttgagtagagaaggaaggagtgatctgagaggtggaaggaggagtaggaattatcatagaaactttaagcttcttgagggcttgtgactgtgtcatgttcatcattttatctgaaagttcttatcaacaaagtagctttcagtaaatat

SEQ ID NO: 373 - DNA, 499 bp, homo sapiens
cagcctgcccctctacctactatcttgtatctccctatgagcaaagcttcaaaaagagcaaagctttctgaaaacaatgtttgcacttactgtctccactctcaacaaatatccacgcttagtcctcagcaacctggcatttatttctattatggagactccactgaagctgttctacagaaggtggcaatcagctgcttaacaccaaaatcaagggacacttccctgtcctcatattcattcaactgtgggctacatttgacattgcagatggctcttaaaatttttatcttcatttaataaatatttactgaaagctactttgttgataagaacttcagataaaatgatgaacatgacacagtcacaagccctcaagaagcttaaagtttctatgataattcctactcctccttccacctctcagatcactccttccttctctactcaacctttagagctgatattcccccaggattcctttctttgctcttctcac

SEQ ID NO: 374 - DNA, 417 bp, homo sapiens
  misc_feature (76)..(86): n=unknown
gttcatgttaatgaaaatccatgttgtttaatagaatgccatcctttacctacttttgctctgtatggacgttttnctnttcatgntctagtgagctttccctatatcatgagaagtggttatatttgtgcaaatatacaaatataggaaaacaaagattcatacctgtaggcaatagtctaacttgtccaaaccactttgcctttactgctatttttatccccaatgcgtagatatttcccccaggcctatagcctttgtgaaggaaagcaaatcatacctcctgtatattgacacgaatctggttttcaaatgtcatttccagattttttagttaattgggggttgtccttttcccttaatgtgagagtcattttcctgtatatttctgggatctctcaggggctgggaaggggg

SEQ ID NO: 375 - DNA, 566 bp, homo sapiens
  misc_feature (36)..(547): n=unknown
atatttctgacagattcatgtaacaaaaaggcatancagttttcaaattgttcagctgggatgatcagtatggattgatgcnaagcagttcgcattctataattgccttgtacaggtacaattctttcccaagagccaaaagaggatccttgagaactaacggaaaagcctaattacataaatgtaaaatactgtttctccctcattctnagataacnacaggaatgacnggaaaggaaggaggatgggtaaaaggttggaggagaagaaagaataagagaaagtatactaaaaatatgcctaacattaaaaaagttagtatgtgttaggtgcatgatccttcatcaataacatggaaaaaaatcaaaataacattacaccacacacaattggcatatcctattgtgtaagcgagtgcagaggttgaacacatcacaatagtgctgaacacagaatcacaagtaatgtcaaaatgataacttccaaccaaaaaaganacaatcacaggccaattacttatatacaatcaaccctaagtcaattntgntccaaataaagatgtccac

SEQ ID NO: 376 - DNA, 324 bp, homo sapiens
  misc_feature (27)..(306): n=unknown
gatgtagataattattaaattgtacanatgggaaaattgaaattcagagagattaaatacaatgnttgctctgtgttacactgttagtaagagagcaatacatgaacccaagtttgatcctcaaaatcacgcttttaattacttgatacatagtgtcttccaatattgaatctagactagggcaaattcncagcncaaaacnanacttcaatttagcantnntgtcgtgctaggacatgaganggattannattgnngacncagcctcnatctnnaagtaattcntaatttagccaantatattanatatctgtaatataaaac

SEQ ID NO: 377 - DNA, 488 bp, homo sapiens
  misc_feature (138)..(482): n=unknown
ttacagattgacacatttgaatttacttatgtaaccttgatgtttgctgcacatgaatgaaattatcagtttgttcccttcatcaaaggcactgaatatttaatgtaccaaaaagacattaaacgttatactcatggnatttagctgctaagcattgtaagtaaccgctgacatttctgttaagagaatatttattttttaagtgattaaacttggtgattgcttttaacacatttagatagtaatttattcattttctttattaaactttgttaagctttattcaactttgatctttaccaaggaaacaacatgaccaaagtaccanaaanngtannatnaacttgttttttgaaaagagtntgtgaacaggtacatggtacaacaaactgatgggcangcagtctatgtacttttccagttgtcattctaagtaatgacccaacttctctatagggcccagntatactatttcccactangcttac

SEQ ID NO: 378 - DNA, 366 bp, homo sapiens
  misc_feature (318)..(351): n=unknown
ctcaactcccagagagtgaacatcccgcctctcttctcaggactggtgctctccgaagcattaagtaggaaattgagagtagtagcaagtgagacttagggggcaggtaggcagaaatcagtgatggcatagccgcgccaccatgaccatcctggccattgtctcctgtgtctcctgctcctcgaggtcttcaaagtctcatgctgccttctccagcagtgctctctgtgatgggagggtgggcacagggtgggtttgtgggtgattctgctgaagccagggagatgacgtctgtccaaggacctcagctggagccangctccaggaagtctgtgggggacactgacatcntgggcatctccttct

SEQ ID NO: 379 - DNA, 530 bp, homo sapiens
aaaaccaaaaacatctcaaagcaaacaagggaaagctccgcaaacagcctggcagcaggaaacccacgagagtttccccgtaataggcgcctccaggcgggggaaaacaaattataagggtgatttatttttatcttattacaaacaggtattttccaaattttctatgaagcacaaggagatctttccttccagaatactagcaaacacaaaaaattttattttgtgagtgcttaaaaagagaaaaacctgaacaaacttgctctccacccacgcaggtgattctccacccacgcaggtgattcttcacccacgcaggtgattctgacttttgggcagtcgtcagaagatcagatagaaaacctgagtatcttggcgttagaatgagttggacagagagtggatgttgccccgggggcttcaggcaccataccggacatccagcatctgagatgagttaaaacgcacagtggaggtgactttcgagatgagggtacacttacaacatacaagttgtttatggcgctggg

SEQ ID NO: 380 - DNA, 556 bp, homo sapiens
  misc_feature (537)..(537): n=unknown
ggcctcctgtagaccggcgggtgcagggcacggtcccagagttaagggtgtgagtgagactgctgcgggcaggggttggcctatgccctctgctagggggagaggtggagtttgggtgtggattaatgggttctgggtgtttattttcttttctctgagtagtgaggcctccaagaagttgtagggacctgtttcttccagacacattaatatgggccaaaatgtggggtctcttcacctgaattaattggagatcttttgggttgaggcctcaggcttcatttctcaggacttccaggcctactcccattagtactgaccgtgaaactattttctgtttggttactttttacattctctgtctaatgatggcataacaaaataaatttaaagattttggcttggtttattattaggtgaagtgattttttttaagtcccaggttatagatattatttcagcatagacactttaaaaagagagaaaatacctggaacaaatcggaaatacgtttgctaaaataactttatttggcanggtgttttaataacagtat

SEQ ID NO: 381 - DNA, 497 bp, homo sapiens
agcacacaaataaccatttcattagctaagatacacgtaatacagccaaaaataagtagtagctttattgatcctctgtctagtgatcagaaacaataatataacatgcatcacatacagtacacaatactcccgattttcctcaacaggaaataaatgtccataatacagaggtttccatatattgttgcatttataatactctgcatgggtatgagtcatcctatttataaagtgatattgaatccacaaaatataagctccaagagggaagagtttgattccattgcatactattgtgtctaaaatctaaataattgctaaatggatacaataacagtaatatatagaacaatgaaattcagatactgttattaaaaacaccctgccaaataaagttattttagcaaacgtatttccgatttgttccaggtatttccctctttttaaagtgtctatgctggaataatatctataacctggggccttaaaaaaat

SEQ ID NO: 382 - DNA, 548 bp, homo sapiens
  misc_feature (426)..(535): n=unknown
gccctttctgcttgcatttactaacgcgttgaatgagggagtactgctagctattcatcttccacctccatcagtggaattcttttggttccaactaacagaacccaaccgaagccttctgtaccaaaaaggtcccatttatctaggctgtgtttgtaggccagtgtgggactggcgtcaagagaaactagactcagggccacatactctccctttttgcttctgtccatttgttcattctctcagactggctttttccatgaagttagaatctgagcaactggcagctcctaggtcatatattcccagatctgccgctagctcttcagtaaaatgaggagaggtgttgggtgagtatggtggtccttaattatttgtcaagcttttctaccttgatccttttcctgtctcatggaatataatatnaattattgcttaattcccctactttctcccattttgagtcttgctttgtaactttatatnatccatttatnctttggtcactcanatatttaagtatttnanattctcnactttatttatca

SEQ ID NO: 383 - DNA, 179 bp, homo sapiens
  misc_feature (53)..(175): n=unknown
cttctttacccattcattaaacctatcatctgtgaaatcactgtaaaaatctncacttctgatatttgntataatggcatanaganaaactgtaccctattggggagctaaaattgtaataggtaacaaatataattaactgtcccaaaatacagctnnccaancaaactttttntttt

SEQ ID NO: 384 - DNA, 562 bp, homo sapiens
atttatttaagcttctttttaatagatggatattaatctcttaaaactaaataatatattgaatatttagtggagaaacttttattatataacagttgatgtcttttaaaatcttgttttcctagcagcaaaattagaatagatagagaatttgtattgctgatatgcaaaacctaacaaattatatttaacctaataggctttcatattttggattacaactttcacaccatacttaaatacaaatatacagacgtggctgacatattctacatagctgtgtggcttacttgaaaaatagaacagttgcttaactggatgactatcaaaatggtcaacacagattgatgggcttgagtgtagcagacagcgggtatgcagatggtggtgtctgtaccgtttgagaagagatggctgagtctttaaaatgatttcattggaatggctttggtggtgttgcagtaaagggcatctattcaatctcaggtgctgtgcagatggcaaagccaagataatatagaaaaatgagaaacaagtgactatttaatgtacagtaatgcat

SEQ ID NO: 385 - DNA, 429 bp, homo sapiens
  misc_feature (334)..(334): n=unknown
tatgcttaaataacagccaactttacctaaacactttcaataaataaagcacttaatctcttgttctctctaccctaatgtaatatgcagcaggcctgcagaaaatccgagcaaattgcctgtacttaattctctcaaggagtcatgtgttttaatgtacaggcatctggataggtttcctgcatgtaataacgtcatttatttgtgatgcagatcatgcattactgtacattaaatagtcacttgtttctcatttttctatattatcttggctttgccatctgcacagcacctgagattgaatagatgccctttactgcaacaccaccaaagncattccaatgaaatcattttaaagactcagccatctcttctcaaacgggtacagacaccaccatctgcatacccgctgtctgctacactcaagcc

SEQ ID NO: 386 - DNA, 555 bp, homo sapiens
  misc_feature (48)..(48): n=unknown
  misc_feature (332)..(339): n=unknown
  misc_feature (522)..(522): n=unknown
aaggaaagctataggctacccattcagctcccctgtcagagactcaanctttgagaaaggctagcaaagagcaaggaaagagagaaaacaacaaagtggcgaggccctcagagtgaaagcgtaaggttcagtcagcctgctgcagctttgcagacctcagctgggcatctccagactcccctgaaggaagagccttcctcacccaaacccacaaaagatgctgaaaaagcctctctcagctgtgacctggctctgcattttcatcgtggcctttgtcagccacccagcgtggtgcagaagctctctaagcacaagacaccagcacagccacnnntcanngcggccaactgctgtgaggaggtgaaggagtcaaggcccaagttgccaaccttagcagcctgctgagtgaatgaacaagaagcaggagagggactgggtcagcgtggtcatgcaggtgatggagctggagagcaacagcaagcgcatggagtcgcggtcacagatgtgagagaagtactccgngatgaacaaccaaattgacatcatgcagtgcag

SEQ ID NO: 387 - DNA, 538 bp, homo sapiens
  misc_feature (48)..(48): n=unknown
  misc_feature (289)..(314): n=unknown
tgtgcaaccttggtaagatgtatggtcccatcagtcattatgtaatgnacttgcacacaatcctgccctcaggtctcaggtcctgtatttcattctcaacctcagcctaagagttctaaactcaagcaatagaatgatgtcagtgatttgcattaataaccaaaaggtaattgcttccggaggcatttttgtaaccaggaggtagagattttcagtattcacctctgcatggattacagactatctgcaaaaaccggtgtatgaaatatgtctgattgtaattttgtgnnnnnnnnnnnnnnnnnnnnnnnnnnagatctgaaattcagagtgtagctctgagacttgcttccaaagtcatttcccaccacatgcagacatgtgtggagaacagggaattgatagctgctgagctgaagcagtgggttcagctggtcatcttgtcatgtgaagaccatcttcctacagagtctaaggctggccgtcgttgaagtcctcaccagtactacaccactttcctcaccaacccccatcctat

SEQ ID NO: 388 - DNA, 568 bp, homo sapiens
  misc_feature (543)..(543): n=unknown
ctgcagatttagtggaggaaaaatccacacatacccccatcccaatcccccagattttcttcaacatgccgcttctgttcttggaagagttaactgcctcgattctgcataagagtcccaaacactgagaactagggtgtcttccccttcctttccttccaaaaaggccagcagcctcaagcaagccaaagtcctttcctcttgaatgcgtagtcttgtgaactccactgtcttcacaaactcagcagctggtggaagctctctgaagaactgagacaggaggtggcactgctctgacaccatcctttgaaggtgacagagcatctcagggcttgggggacgccagccggactttgagaggagacagaagaggtgcttgcagaggtatttcacaaagatcagggtctcggcccaaaagttgacttctgctttttcaaacaggtagtcttcttccacctgatgcatgctctccacacaggccacgaggtcatcactctctcccaacagccatcccagcaggatgggcagtccagggggcaactngtcccactgctggagcagatcacac

SEQ ID NO: 389 - DNA, 557 bp, homo sapiens
  misc_feature (2)..(48): n=unknown
  misc_feature (340)..(340): n=unknown
  misc_feature (421)..(421): n=unknown
anataacaatatttgcnatttttaaaggtatttaataattganaaatngactcttcaaggactacttgtaaaaattgcaggaccttaaaaatgcatttgctttttctattactttagaaattataattatatgcatttttgtatgcctttacaactagcattatttgttcccagccttcctttttcagctttcatggtgaggttttagtgtcattaccttggcttctgggatgtttggaaataggcaatactgtattaatttctgctctttagaacattctgttcttttgatctagtttattgcttgatagacactggaaagcagaataatgcttaactnccttttttttgctgcttattttataaattaatctttgttaagagatttctgacatcatcagcatcacatcatatgtttccnttcagcggcatctggaggtagcagaagtagcagcagcccactggtggtagtgtctgtgaagtctcccaatcagagtctccgccttggcttgtccagattagcacgagttaaacctttgcatccaaatgccactagc

SEQ ID NO: 390 - DNA, 441 bp, homo sapiens
  misc_feature (87)..(87): n=unknown
taattattttcacattaatatagatatttccataaaccaagaaaaactgagttattatacattttttaacagctaacatgatttganaattttttattaaaaattgatcagaagctagttgaaattctcaatgtaaatataaaatattcattacaattgtttttcaaagtaaattcagatctaagcttcctgaaaagctgtactatctcatatcataatagggatgactaagtacttgacaactactttctaaagaacttaacaaaaagtgactatttgaagattacatttacaacagaaaggccaacattctctgcagagctctcattttatcatgaaatgtggacaatcaggaacacgtggatgagtggtatcaagaaaaagggcatttcaaaatatttccacttttattaaaggtttgacaatgaagattcataaaat

SEQ ID NO: 391 - DNA, 503 bp, homo sapiens
  misc_feature (258)..(494): n=unknown
ggaagtatcagaagtcaagatcaattttcaagaacaggagcataaaattcaaactcaatctgtgttaacattaagagatttagaagctcattcagactgataactaacgaataatatagctttcatttgttggagactttatgtgagccagccagttatacatgttatttataatccccacagtaacactgcaaggtagttatcaactctattttgcagttgaggaaattgaggctaagaaatatgccatttaacttnnnnnnnnnnnnnnnnnnnnnnnnnnnnnnnnnnnnnnnnnnnnnnnnnnnnnnnnnnnnnnnngcattttgaggtcccagtgagtagctcttctggtctggattagttcagctatctgcagtctgctaacatatctggtgctagatgatctacaatgantttacccacttagtaaatcatgttgatgggaaggttttgttcanggnncctcaactctcctccatgagactggtgtnaaaagctgc

SEQ ID NO: 392 - DNA, 638 bp, homo sapiens
  misc_feature (2)..(479): n=unknown
anatgnaactnancnattcctctnctcttnacatggntctatttctctacttctcaaatctggnaatggtcatctgaattgtttggtcaactagaagttagaaattttaaaatggaaaattttnaaattagaaaatttaacacaagcatatatttgaaaaaatgctcaattactggggcttttcctctcttgctgtgcttgaaaacttnagtccatgacatgattgagctcanggcagcttttcanaccagtctcatggaggagagttgagggtacctgaacaaaacctaccatcaactanatttactaagtgggtaaagncattgtagntcatctagcaccagatatgttagcagactgcagatagctgaactaatccagaccagaagagctactcactgggacctcaaaatgcnnnnnnnnnnnnnnnnnnnnnnnnnnnnnnnnnnnnnnnnnnnnnnnnnnnnnnnnnnnnnnnnaagttaaatggcatatttctaagcctcaatttcctcaactgcaaaatagagttgataactaccttgcagtgttactgtggggattataaataccatgtataactgggctggctcacataaagtctccaacaaatgaaagctaatattattcgttagtta

SEQ ID NO: 393 - DNA, 427 bp, homo sapiens
  misc_feature (3)..(100): n=unknown
tcnnccgatatnnnnatntcnnaaatatatnatganatacaatttaanagtcagatccttttaaaaaaaacttttaaccagaatgaatccatttctaggnggggggttttatgcctgtaatatttaaaaagcctaaaaatgatcttgctggttttcttcagttgagtgttgtgtaagtgaaaattacttcacaaatcccactattagctattataatcaaatcagctttcactcttccatgagactgtttccttcacaagactttggttgaccataaccaattttatagtaatatacaacaaaaaataatgtggagaatagcaaaattaaacatatttttttaaaaaatagaggtgttctttcccaggattttttttaagagtaaataatgttagcttatgggattgtagtgcacagcacatccccc

SEQ ID NO: 394 - DNA, 189 bp, homo sapiens
  misc_feature (167)..(167): n=unknown
ccaaagaaatgaaaataggacctgaagctggttgattagtgtacattgttttggcctttatgaaaccacattgaatgataattcatgagatcagggtatccaaatcatcttcttctacattgttcctccttaaaaataagccccgttataaacctttggtggactcngtgctgtctgaatcccagaagt

SEQ ID NO: 395 - DNA, 405 bp, homo sapiens
  misc_feature (101)..(101): n=unknown
  misc_feature (396)..(396): n=unknown
tgaacttagacttgttaacagaatagcagacttgtatgagactaaataaaaattatatgttgttatagtgagtggtattgaatagtgtgtctttgccaggnagagagctttgtaataggctgtgtcttgtgtagttgtgaactatttttttttcctaaaatttcttcagatgccaaccatgtctgtcaaactctggatgagtcgccttttacttagctttttaagaactctttttggattcactaacttttatctgcatttttttatccatgctctattaagtgtctaggatcctgataattatgcattttctctgaagatatctatttccagtaaaattgactatctagtgaagattgtaagccctgataatatattttgaagtgctgttatgancggatgtgt

SEQ ID NO: 396 - DNA, 296 bp, homo sapiens
aatacaaattttaaaacaaatactacacagtttaatagagagattagcaaccaaattgtataggctggaatgacttttttcaggttgaagaaaatgaaattatttttaaaaatcgtaacaaaatgacttgaacatgttatgtgatggtttatatgccaagtaattacttttgattgatttattaatattttttaatgagcacccaaaaactattgtataggcagaaaaaagaactattaatctatgaatagaaatttctttagcaatttcattcttaacagctattatttctcgag

SEQ ID NO: 397 - DNA, 341 bp, homo sapiens
  misc_feature (31)..(338): n=unknown
ttccttcctacaggcgaacgtggcaaaattngggcctctcnctcgtgttcttnctganattacnaagtcattgactaatcctacgccaatacaacagcaactnngacgcttcactgaacatnactccagnccaaatgtcagtggaagcctctcctctgggctgcagaaaatatttgaagancccactgacagtgatttgcataaactanaatctccaagccaggacaacacaggcagctacttcagagggaaaacatnattgctggttcagcaagcctcctctcagagcatgnacttattctgaaaaggatgaaagggaaactanccttncnaatggncgg

SEQ ID NO: 398 - DNA, 414 bp, homo sapiens
tataagcccaaatggctctgtgaaatcagaagtgcaaaggtgtgcaaacttgtatctgaagacctaccagggacaagcaggtaagagctgatgtgagtgtgtgtgatgggatctgtaaggaactggaacacacatgtcctatccaaaggaatcagctgcagctgcttgttgtcaagtataaagtcaggacctggcttggctttaaccgtttttcaagaaaactggaaatctggattttcagcgaacatgcctgattttaaaaggttgactcaagtttttacaaaatactatgtgggacacctcaaatacatacctactgactgatgacaaacccaggagtttgtgtgtcttttataaaaagtttgccctggatgtcatattggccgttggaggacacagtttctattgtaattt

SEQ ID NO: 399 - DNA, 371 bp, homo sapiens
  misc_feature (2)..(62): n=unknown
  misc_feature (211)..(358): n=unknown
tntnagacgcctctgtttcttataacctaactttcttttaaagagaaaatgtccttcttcantcgtaaatccaaatttacaatagaaactgtgtcctccaactgccaatatgacatccagggcaaactttttataaaagacacacaaactcctgggtttgtcatcagtcagtaggtatgtatttgaggtgtcccacatattattttgtaanaacttgagtcaaccttttaaaatcaggcatgtncgctgaaaatccagatttccatttttcttgnnaaacggttaaagccaagccagntcctgactttatacttgncaacaaggagctgcagctgattcctttggatangacatgtgnggtccagtgcctt

SEQ ID NO: 400 - DNA, 320 bp, homo sapiens
  misc_feature (219)..(219): n=unknown
agggcacaagccgcgctggctgggctggggcgtgctgcttatgggcacggggtcgctggtgttcgcgctgccccactttcaaggctggccgctatgaggtggagttggacgcgggtgtcaaggacgtgccctgccaaccccggcgcggtgtgtgcggacagcaacctcgggcctgtcccgctaacagctggtcttcatgctgggccagttcctgcatgngcgtgggtgccacaaccctctaaaacgctgggcgtcaactacctggatgagaacgtcaagtccagctgctcgcccgtctaaattgccatcttctacacagc

SEQ ID NO: 401 - DNA, 497 bp, homo sapiens
  misc_feature (447)..(447): n=unknown
ctgcagggccgtacagctctggggacaggaggtcacagccgactttaaaccacaggttaagtagaaggttgcaggtcaaatagaagttcccgtgtgattgcatcacccaacggcactgttctgtcatcaggaaatgctgagtgcccgccgtggccgggtgggcgcgggcggtggtcagacgctgctctggagctggctatctgtggcactgtcaggggctgaggactggctgggcagacaagtttccaggccatctgaagactccgacaggggcttgtataagaagcaggctatggcaaagaagaggacgcccagcaccttgtacaggagccccatgatgagtatgtagcggctcatggccgaattctggtacaccaagcaggagccctgctggccacactggtcctgccacagcagacaggcttgtcgatcacccagccgaaggantggggcccgggatgcccctagtattctaactacaatccactggattccca

SEQ ID NO: 402 - DNA, 446 bp, homo sapiens
  misc_feature (155)..(155): n=unknown
  misc_feature (363)..(363): n=unknown
ctcaaatctttacattcatcagagagtccacacaggagaaaaaccctataaatgtgaggaatgtggtaaaggctttagtcggccttcaagtcttcaggcccatcagggagttcacactggagagaagtcatacatatgtactgtatgtgggaaangctttactctgagttcaaatcttcaagcccatcagagagtccacactggagagaagccatacaaatgcaatgagtgtgggaagagcttcaggaggaattcccattatcaagttcatctagtggtccacacaggagagaaaccctataaatgtgagatatgtgggaagggcttcagtcaaagttcgtatcttcaaatccatcagaaggnccacagtatagagaaaccttttaagtgtgaggagtgtgggcagggtttcaatcagagctcacgacttcagattcaccagctga

SEQ ID NO: 403 - DNA, 621 bp, homo sapiens
  misc_feature (556)..(556): n=unknown
attctctgatgttcttaccacccctattacttttataggatttatcaccaacatggattctgtgatgaactgtaagatttgatcgccaactgaagctcttaccacatatctcacatttataaggtttctccccagtgtgaactcgctgatgagactgtagttgtgaagaccgactgaagactttaccacacacatcacatttgtatggtttctctcctgtgtggacactctgatgaagttgaagacttgaggcctgactgaagtacttaccacactccccacatttatatggtttttctcctgtgtgcaccctctgatgcatgtcaaggttcaagctccacttgaagcccttcccacactcatcacatttgtatggcttatctccagtgtggactttttgatgggcttgaagatgtgcactccgaccgaaactcttcccacattcttcacatttgaatggtttttctccactgtggactctctgatgggccaaaagatttgaggcctgcctgaagaccttcccacactcctcacaattatatggttctctcctggngtgggatcctacagtgaattttaagatctgctctaacgactaaatcccttgccacactcttcaca

SEQ ID NO: 404 - DNA, 392 bp, homo sapiens
  misc_feature (105)..(105): n=unknown
  misc_feature (384)..(384): n=unknown
ggaaatctctcatcttgtttttgtttcatgtattttttaaagttttcatttgtgccacaaaaatctgtcgtggaatatattttattttcattaattcagtgaagntgagacttcatagtaattttagaatgcaacttgaaggtaaaaattttactttgtcaatactgaagtctctgctgtaatccttatatatctttctccagagaacataatattgtcaaatagatacacatttttctaataggtatttagaagcacttgaaatattcttaatctctgcatgtgttacaattcagttatttctgtagtttgtaaactctaaaagtgacattaccattattttagaggatggcctaagttgtaattttggatttttgtgggaanccattgtt

SEQ ID NO: 405 - DNA, 471 bp, homo sapiens
  misc_feature (448)..(448): n=unknown
gttgaagaattcatacattttccagccccaaaaaggccacacagaatcacaaacattcaacgtgttccacgataatgatatgtatgagatgctcttccttataaactttattacgaagcaaataaaataatacattcataatatatgaacaaagaaatcatacattaagaatcctgttgtgatttgctcttaagagcaaagagctgcagaatctctaatataaaaaagaggacattttcaatgtgtccattttcctaagaaatgtgtgtatgaaatgcctccaagtttctcatactatatatacttgctttaaagaaggaaattatttctcatttcattttccaaatgagaaacattgcctaaattcatgacatccctaggattattcttagtctcaacttccacacagagatgtctggaaatagaaaactcttaaggtatccagaanttcagggatataaagctttccac

SEQ ID NO: 406 - DNA, 409 bp, homo sapiens
  misc_feature (367)..(374): n=unknown
ggagcactgatctgccttggagaacctgatcctgagactccagcaggatgtcttatcaacagcagcagtgcaagcagccctgccagccacctcctgtgtgccccacgccaaagtgcccagaaccatgtccacccccgaagtgccctgagccctgcccaccaccaaagtgtccacaggcctggcccaacctcagcagtgccagcagaaatatcctcctgtgacaccttccccaccctgccaagtcaaagtattccaccgaagagcaagtaacagctttcagaattcatcaggaccaaagaaaggataaggatatttgggctcaactcgtttccacaagctccagcttcatcttctcatcaaaggctancatggnntacacagggagcttctttctccttagccagtaatc

SEQ ID NO: 407 - DNA, 271 bp, homo sapiens
  misc_feature (109)..(257): n=unknown
ctgagctgaaacctaaaggccgcggagtcggcggtgttgtaggtagcggtaccttgagtggcaacagaattcgattaaattacaatgggaaacatttttgaaaagctcnttaaaagtctacttgggaaaaaaaagatgcggnttcntataatgagttggatacagctggaaaaaccaccatcttgtataaattgagctgggggagactgtgcctgccgtccctacagtaggtttctgtgttgagacagtanaatatnaaaataacaccttc

SEQ ID NO: 408 - DNA, 230 bp, homo sapiens
  misc_feature (135)..(167): n=unknown
accatagcaacaacacttcaattccctgagaacttttcccttatcattcgctttcctagctatgtctttgcaaagagaaaaacaacaagaaacacagcccacgggacaggtgagccatgctgggcccagcggggnngnggcagctacacaggaggnnggcagggatnggaggttccagatgctggaacgcataaatacacagagtgccagacagtcccacttcagcttta

SEQ ID NO: 409 - DNA, 405 bp, homo sapiens
gccatttttcttccaaaagaattccattccagcatttcctctcatgtttttctgtctctcttttttaattgcatgcagtgcatgataatttcttttctttcatgacatggcttagcctcacagacagctgaatgttgtcaccacttatttggaaacctcagggaataattgtgttaccagcgtctgttctgaatgttttctcatttttctccaattttagccatgacagttgaaaaagcaagtccagtgggtgatggaaatttccggaatcgttctgctccaccttgtgcaaattccacagttggggttgttaagatgacacctctttcttttattcctggagcaaaaataactaagtatttgggataattaacatggtttttattcgagagactacttctcttc

SEQ ID NO: 410 - DNA, 484 bp, homo sapiens
  misc_feature (317)..(358): n=unknown
agatattttaggtcttggtaggttttccccacttctcttgtttagatataagtttggggcatgtgactacagtggctcagttcccagatgtaatgctgagagactgtccagtgcgctgcgttctagaactgctacaaatatgacacaattccatgctgcacccacagaatagtgagtagtgtgtaggccagggcaagaaaaagaagagcaataatattctagttattgtaggccaggggacccacatccacgatatcgtttttttacagctcattactgaatcctcacaataaccccatggggtagatattactgtnnnnnnnnnnnnnnnnnnnnnnnnnnnnnnnnnnnnnnnnnntaagtaatggactgcaaggacactctgtctctggcccagaggaacagctggaggatgccaggcaagatgtgtgttaagggggtctgcagagtgggggtaaactgattctggattactcataatgta

SEQ ID NO: 411 - DNA, 371 bp, homo sapiens
ggatgttaaaatcccttctccaatacctcccacagccacccaacctctccttgaatgctttcagggatggagaactcctggcctctcaacatgttccatttctgaagagctccctattgaacccataccctccacccactggtcggagttctacattaatgagtaatccagaatcagtttacccccactctgcaggacccccttaacacacatcttgcctgcatcctccagctgttcctctgggccagagacagagtgtccttgcagtccattacttaacctcgtaaagctccagtggtcctcatctataaaagggtataacagtatatctaccccatggggttattgtgaggatcagtaatgagctgtaa

SEQ ID NO: 412 - DNA, 371 bp, homo sapiens
cagaaatcttctgacatactgttttaccgcatgaactattgttttctttataaattccttaacaaatctctgttgtatagaatactgttggttaaaatatatcagcagctaatagctcattttaaatagattctgaaagttcaagaatttcaggttgccagacactaatatactctacaaaatcagaaaaggctcattactgcttacttacacaacaaaaaatttcctaaaaatcatttttaaatatgtttgagttcaaaacataaaaatgccatgttacgatatttttaaacttaatgaaactggatatatttgctgattcttgtaagaaacacaatcacaaataaagctcatctgtttgtccaaaccca

SEQ ID NO: 413 - DNA, 274 bp, homo sapiens
  misc_feature (106)..(266): n=unknown
cttacaagaatcagcaaatatatccagtttcattaagtttaaaaatatcgtaacatggcatttttatgttttgaactcaaacatatttaaaaatgatttttagganattttttgttgtgtaagtaagcagtaatgagccttttctgattttgtagagtatattagtgtctggcaacctgaaattcttganctttcagaatctatttaaaatgagctattagctgctgatatattttaaccnacagtattctatacaacagagattngttaagga

SEQ ID NO: 414 - DNA, 480 bp, homo sapiens
  misc_feature (47)..(47): n=unknown
  misc_feature (152)..(152): n=unknown
  misc_feature (444)..(476): n=unknown
aataaaacaacctccaaaagatacctcattgcagattttcgccaggnttcaggtgcttaggttttggcacatatcttcctcactttttcctatagtgtttttaacctgttataattggaatgatagagatgtatttcagaattttgcatggnccaaatcaatgatttttctttttaatatgtaaagtatttcattaacagtgtagattctttctgatgtttggggagccatgtttaaaaatgtagtatggagcaattgaaaaaggggtctttttccctagcctaattcttactaatctcagaaaacaaagatcaaatagactgtgaagttgaactagtcctcttagtgtagtaaccaaatttaggaaagatcaggataatttaggaaggaaagtaatcatttatttaattattataattataaaccaattattttaagtttggnatattttatggtataaaaccattaccatggtnttaa

SEQ ID NO: 415 - DNA, 158 bp, homo sapiens
ggacgtggagctggtgcccgaggacgacgggacggcctccgcggaaggccctgatgaggcgggtcggccgccacccgagtgagcgacacggccgtggggcctggcaggcgctggacagcgcccgaggactgggacattaaacctgacctcccctcctc

SEQ ID NO: 416 - DNA, 106 bp, homo sapiens
  misc_feature (90)..(90): n=unknown
agcgctgccaggccccacggccgtgtcgctcactcgggtggcggccgacccgcctcatcagggccttccgcggaggccgtcccgtcgtcntcgggcaccagctcca

SEQ ID NO: 417 - DNA, 613 bp, homo sapiens
ccctggtgatttgtttgcacattagagtttgaggaacactggtgtaggtttctggttactcatagagttgttccccttactcaggtgcccaccccagtggtggatgggggagcgaggcggaccatgtgacttggcatgaacacactggggccacaagatgcacatctgatacataatctaagactgttgggttttcctttagctcatagcatttccatcaagggtattggtagtctccagttgctgagacaaagtgaatagagaatctcatgatttatttaaaaacaaaactattttaatatgtccccattttatttatatcttactttttattagcccaaagataattaaacccgaaaatactgtagactctgtataatttaggcagttttatgaatatggattttaactctgacctaaatgagctgtctagtgactcaacaatagctacctcttgcttcaagatagtaggaactgatcagcttataaagctgatgctgcccagttctgttctgagtccagtgtgcatagctctgggctcccaccatgcccgttagcctgtgaaattgatttttttaaatggttgtacaggcatttggcctatagccaaaga

SEQ ID NO: 418 - DNA, 463 bp, homo sapiens
atatatgttggagtatatttattagtatgtaattttcccctgggttttgttttggtcattctctttcagagtgagcatcaatactccatttttctaccttacctgccctttgaataaacctgaacttgcactgatgatgttaaacatgtttgaacacttgaccacaacataccccattaaccctgcatggaagcaacccatctgacaaccaaactctgggttgttatttggaagccgaaatatgcatcatgagtgcatttgcgcattacctgttacataagcacagcaaatgcttggtgatacattaaagttcctgcttgacaatatgatctttaatatgcagacacatatcacctgatactaggtaattgtatggaaattatgagaagtaatgggggagaaagtataaaatggtgacttttctagtatagggattattttactgactcttggagtcagacag

SEQ ID NO: 419 - DNA, 353 bp, homo sapiens
  misc_feature (23)..(23): n=unknown
  misc_feature (172)..(335): n=unknown
acccaggtatgacattaaaattntaccagctcctctctcacctatgctatcctgagtaacatggatctaagtatgcttgcatcaaggtgaatctcctagtctccactcattctagactgtcactcctaaaccctactaactgaaattccttagtttatgcctctaactcacntcttggttccnccattcaaggacntatctcccagcnatcaaaatccacagaatgnaattcatttgtagagaaaatgactgtggagtttgagaactgtttcatagatgaatgacattaattaaggntatcatctctagaaagcctggagnttctgtaaattatnaactattcatctcaattc

SEQ ID NO: 420 - DNA, 300 bp, homo sapiens
atggaagcttcctccacccttgccaaatgcctttatgaacttaattttacagttcagagtaaggaacaagaaaaagactcagaaatgctgcagtgaaaaataattccacttacacagtgggggactcaaagtcagccacatttcacatactgttactgaagaaagcaccaagtcttaatggaacaaagaccatagaatgaattattttatctcctcccatgatgctgagaggaagcttcgtattctgatctctgagtgaatccctttgttctctgtttaaaaaaatctaaaaagaaaaag

SEQ ID NO: 421 - DNA, 70 bp, homo sapiens
  misc_feature (20)..(61): n=unknown
agagatcagaatacgaagcntccnctcagcatcangggaggngnnaanataattcagtctntgggtcttt

SEQ ID NO: 422 - DNA, 402 bp, homo sapiens
  misc_feature (190)..(192): n=unknown
  misc_feature (386)..(386): n=unknown
catgaatggtatttcagcaaatggtgtgagcaaatcagaaaaacaactcatgatagaaaatggaaaaaagcagaaaaatggaaaagcaaaaggagattaaattgaactgggccttaactgttgttgacagtgaggaaaaactcccatatcatataaaatttcagggaaaacagaagcaaaggagagcttngnggtggggagaaaagacaaatgtgctctatgtcctagtaactcttagactgagtaaagtgttaataccatacccagatgttttatttatgaagtttttattttaaacattttttttaaaaaattagccttgatattctccagaccaaagcaatcattaagtgactttggggattctccccctgttcacatccagntgtctaaaggatgaga

SEQ ID NO: 423 - DNA, 439 bp, homo sapiens
  misc_feature (317)..(435): n=unknown
aagaggtaggtatatttccacatatgaaaaatcaggaacagccataaatcaaaacaaggaaagcctgataaaaatcaacatattctaacagcacataaatgtaactatcttatgatgttactaataaagacatgagttgtttcatgtttcaatcagacaataatcttaattttcataatatatttctgctactaacaggagtattcaaatgctgccttttcatcacaaaaaattgtttccccacagtgatttgtgcctcaagtcatggtgatctctgggtcaccagacaagactttactgcaattctttcttatttnnnnnnnnnnnnnnnnnnnnnagcctctaagattctacagagatcagcagattttaaaaatttnnntacaaccntnnttgtactctgactagaggtggagagatttgaccattccggtnagca

SEQ ID NO: 424 - DNA, 401 bp, homo sapiens
  misc_feature (62)..(62): n=unknown
gagaatcagaattacaagttcagtggagttgtatgttaagctagataccaaccatgggaganaaggggggagtgagaacatagcaaataagaactggagtatttggtgctgcccagaaagctttgttggaaaaagatttgaagcaattggtggagtcaacagaatgggaggttagagaaagattaatgcgacggacttaaaatgggtcagagcagggatcccaggatgtccagactgaatggagggtggaaagagattaagtacaaagtgaggaagatggaagatggttgaatagtgctgaatatcaagagtgtacatatcatccaaaagagatgtttatatccactaaatgatacagctgaatgaagaaagaatgctggagaaaatgtaaggagtttgca

SEQ ID NO: 425 - DNA, 550 bp, homo sapiens
  misc_feature (486)..(486): n=unknown
  misc_feature (538)..(538): n=unknown
cttgaaatggtcagagacccagatttcttctctcctgatattatagcatccatggcatgtggtttccagcttatggtgcccaggatagctgctcaagcttcagctatcttgtctgaattccagctagtagaaaggagtaaggagcaagaaagggggcatcacattccttaaggacagtttctggaagcaccacataattccatttacacccattggtcagaacttggtcacctggctgtatctatcagtaaggaagtcagtcttgtgatcagtcaaaacactaaatatcttatttctgtggaagaagggaatagtaaatattaaaggacaccagcagtctctgccacactcacctgtatttgttccaacttcaatgtgtttctgtttcttgccacttcttctagattgatctggagcatagcagagagagattcttatttaatctttcaaacaacagagtgaggtaggcattactattacatttantctacagacagaataaaaatttaaagaagtactgacctgtgtaagtcacacnattacaaagtag

SEQ ID NO: 426 - DNA, 354 bp, homo sapiens
gaacaatatgaagattcttttcttggcctttctgtggattatgtcatatataataattatcagaatcattctacttggctttaaaacatgttttctccaatttttttaaggttcataatttagccttttgtttttatgttgcttagattcttatgtatactgaatattttattaacatgtagcatcaggttgaacatgcttgtcattgatatatggaagatgctatagttagaagtgaatttgttctgctttcttaatcttttccatgcttagcagtgaaaaacaggttttgccccagtagagggatctttggagggtattattttttatgctgctgaatatcatgtctataat

SEQ ID NO: 427 - DNA, 408 bp, homo sapiens
  misc_feature (136)..(136): n=unknown
  misc_feature (360)..(400): n=unknown
acagaatgagttctactagtcaatgaaactttgccaaagcaaaatcacaaacttccaatggggaggtccagtcagctagcagcagtgatccccaagcaggaacaccaagaaacctgggggacccctctccaaaaancctcctttcaagaggccctaactcacttctcccacatgcacccacacggatttaggagcttggacatgctcctcatttccatatatttttagtttcttcttcactgcaataaatataaagttggcaatgctcatacaccacagcacagacaatatttcaggctttagcatacaattgtaaacagtgactaggttaaaaaaataaaataaagtaagttggacttntttnnttanttttnttnttaaacagacaaanttcctaagnaccgggca

SEQ ID NO: 428 - DNA, 421 bp, homo sapiens
  misc_feature (98)..(130): n=unknown
  misc_feature (238)..(416): n=unknown
cagggctagaccctatctctgaaaaaatatttttttttaaattgcaattatctgattatacatgaagtagatctaggaactttatatgtcattttttnttgtattttgtcacaaaagaagttttaatggnagaaccataaagctatttgacactcttatcactaagagaagaagtgtaatagattcataagctttgtaaaatgatattccttgtatgctgttatcacagtcttttggnagtaattccttagttaggtaatgcatgantcttgcaaataaattttatttgggaagtcagtaacagccttatggttcccatgctataatcancagggatgtatttgattcagttaagatagaaactgtgtctctattnctattattcatcttattaganaagtaatgctctgtatagnaacta

SEQ ID NO: 429 - DNA, 442 bp, homo sapiens
  misc_feature (380)..(402): n=unknown
gctgattcctatggagctggcttaagaccctagttttttttttttttgaggtaagccacaattaaaccaggtccacctacattctccttggaccttgtctctctgaactgcatgcagaacttcacataactttcatctgtatttcctctcattactagttcttctacatcttttagaattcttttatgagcagtattgtgtgctgtgctgggggtataaaaatgaaaaagacatagctcctaagtaatcctcagggagacgttgctcccacagttaccccagcacatgtgtgctaagggtttctcttttgcacctgtaacagagcacaggacacagaaagaactacccagggtggcaagctggagcaaagctgagttccnaatttttggtattaacaatggntaatatttatcgagtgcttactccagtggccagccatcat

SEQ ID NO: 430 - DNA, 588 bp, homo sapiens
  misc_feature (19)..(19): n=unknown
  misc_feature (112)..(580): n=unknown
ggttattcttcccgtatanaactgttaaatgagtttcaagagatttctcttaagtgaaaaaagcagaagaaaaaattatttaaagaatacaattcagcagtttttcacctcnttggggctgnnaatcatcttgataaaccatataaagggagcaatgtcaccttagatgtcaattttggggcaggccttttaatttattntgttccannatttaaggaatgccctatatggatcataganggcatatttctcaaagctatgnagggcatannactctggaaacttacaaataaaaaggaagctttaanacaactgggatataccaanagaaaacatcnatctaacgttttnaccatganggctggcactgagtaagcactcgataaatattagccattgttnataacaaannataggaaactcagcttgctccagctgccaccctgggtagttctttctgtgtcctgtgctctgttacaggngcaaaagagaaacccttngcacacatgtgctggggtaactgtgggagcaacgtctccctgaggnttacttaggagctatgtctntttcatttntatanccccagca

SEQ ID NO: 431 - DNA, 431 bp, homo sapiens
  misc_feature (420)..(420): n=unknown
ttatgtctcagtgggaagagaaagatcctttgcttcgggtctttgacactcggattgataagataaggctgtataatgtaagggcacccaccttgcggacatctatatatcagaaatgcagcactttaaaagaagcagcccaatcaattgagcagagactgatgaaaatggatcacactgcaatccacccacatctacttgatatgaaaattggtcaaggcaaatatgagcaggggttctttccaaagttacagtccgatgtcttggcaacaggaccaaccagtaacaagtaagcatgttcttcacttgagtagttggttgaaggaatgaatgaagggtggggtctctgcaactcaaatggacaatgcttaactattaaacatctatctgattacttttttcatgaccacattaatgcanttgaaatatgg

SEQ ID NO: 432 - DNA, 429 bp, homo sapiens
  misc_feature (60)..(60): n=unknown
  misc_feature (172)..(174): n=unknown
  misc_feature (276)..(428): n=unknown
caaatgcattaatgtggtcatgaaaaaagtaatcagatagatgtttaatagttaagcatngtccatttgagttgcagagcaccccacccttcattcattccttcaaccaactactcaagtgaagaacatgcttacttgttactggttggtcctgttgccaagacatcggacngnaactttggaaagaacccctgctcatatttgccttgaccaattttcatatcaagtagatgtgggtggattgcagtgtgatccattttcatcagtctctgctcnattgattgggctgcttcttttaaagtgctgcanttctganatatagatgtccgcaagtgggtgcccttacattatacagncttancttatcaatncgagtgtcnaagagccgaagcaaaggatctttcncttcccactgngacataactcgng

SEQ ID NO: 433 - DNA, 356 bp, homo sapiens
  misc_feature (129)..(129): n=unknown
  misc_feature (255)..(349): n=unknown
gttgtaatgtggaagttttcgttgtcatttatataaaattggggatacaaatgtggataaaacagactgttattggaaagcacacaatctagtaaggaaaaccagacatgtaaaaaattgtaatatagntataataattataaatgcatgttctaggtgtgatgatagcacagagtagagtaattacctctgcttggcatcgtcagggatggctttatagaggagaagattcttgagctgagtcttgaagaaggnatagtagaagtttgtcttgtggatttggtgaaanggggaatatgnatgttggataagtagaagttcgagaaccatatangaaagagaaactggnccatgtg

SEQ ID NO: 434 - DNA, 407 bp, homo sapiens
  misc_feature (301)..(352): n=unknown
tagaaatagagatctgcctcaaacaccatacattcccctgtgcttccctctaagaaagtaaggcagggaagtaccacctcatcctttctctcagtttttgttcacaaggggaatagtattgtctgcctctcctcattgcccagatgccttgtaagggtcttctgaaggtaaagaaacacatgaaaatgcacattgcatatggtgatgtagtaatgcctacatgtgtgcctaacacacctttattgggtgagtcataggagtacaaagagtaattgcacagaattaaatccattcatgctcnatttttgctctttctagtattttagctataacaacaaacagcattctggangggctaactgtgctcatctgttccaggcattgtatgaaggctttgcaagccatat

SEQ ID NO: 435 - DNA, 479 bp, homo sapiens
  misc_feature (207)..(453): n=unknown
tactaaaatggaacatttgtctttagacatgttatagtgtttcatgtggtcatttgtcaccgttttgtaattcagagagaatttaacaagaaaaatctcatttaaaaaaaatcaacgcatcttttaaatggtgttttggagaactggctcttgggttccccagaattagaagggccagaattttatctcagaggaaagtataactanaaagaagcaattnaaaaaaaagggaaaagaacaacaaaaaaccatatatagcttaccatttttttgacttcagcnggggaggagggttctgggaatgagaaacagtgctctcattggatgcatgtcacagagagctggggagangagacggtcgtgtcagtatggcacttatttcactcattcttgatttctagggtcagtcataaataacatgaaatgctctggcccatcgtctgactnacaggnttcataccaagcagtctagacatcta

SEQ ID NO: 436 - DNA, 230 bp, homo sapiens
ctaattttttgttttgaattttgaatttaccttttggagttcttctcatgtgaatctacttgttagattgtattaatgagtgtttctggtttgggcatgggaagtgatgggggcctgaagttattttgcagtggctaatggcactgaggaatttcttttttggtgcatttggtttacactcatttcctctcctaattgttagttcatttgtaacagtgggtgagtgtttg

SEQ ID NO: 437 - DNA, 267 bp, homo sapiens
  misc_feature (13)..(21): n=unknown
aaagtacaaaganagtaaganctgggctccatgaagacagcattcagaaaacactaggcatagtgtttaagagcccaacccttggctgtgagctggaaggctcccctatgtttccttctgccatcaacccaaccaattagactatttcatgggagaaacagtatccctcctttcttctccctcctttcctccaaacactcacccactgttacaaatgaactaacaattaggagaggaaatgagtgtaaaccaaatgcaccaaaaaag

SEQ ID NO: 438 - DNA, 320 bp, homo sapiens
gccaggaaaagattcttctgtggcttcttcagtttatgcaagaacagggcatctcgttggatgaagtagaccaggatggcaacagtgccgttcacgtagcctcacagcatggctaccttggatgcatacagaccttggttgaatatggagcaaatgtcaccatgcagaaccacgctggggaaaagccctcccagagcgccgagcggcaggggcacaccctgtgctccaggtacctggtggtggtggagacctgcatgtcgctggcctctcaagtggtgaagttaaccaagcagctaaaggaacaaacagtagaacgtgtc

SEQ ID NO: 439 - DNA, 549 bp, homo sapiens
aaaagtagaaatgacagaaaaaacactcttgacagaaacaataccactgacctgatctcatgaaggagctgagccaaatctgcccacattatggggaaagggaggttcaatcaacattagcaaatactcatgcaattgatgaaatataaaatggtatcagtggcttggtgaatgtcctgtgggtagggtgaatcaatctactcttaaaaaacatacattttcccaatcatgcttttaaacggcatcttttaaaaaaacaagttatatatacagatatcaccccaaaatgaatcttttacagtctactactataaatttaaggcatcctgatattctgttcttctgctggtgaggcattgttttcatggttctctttccaaagaggatagtccagaaatttccaataatttccaaagggcatcagtgagagaaaatttaaaaagtgatttacaagaagagtcttttgactctggctcagcaatgtgctttatgctgtaggatttcttcatttttctattgatgtcattatgctgccttattctttccttg

SEQ ID NO: 440 - DNA, 384 bp, homo sapiens
tgcaaatctctgttttcactccttggaatgtctccattgttagcattaaagtccccaagaagtttttattgctgtacggttttgaacccaatgagtctcatttccaaaagattcctaattctatataggagaggttgcaaatgtcagtgcctcagaaggaccaggcaagttctgtaaatgattgatgtggataaggcaaagaggaacacaagaatggtggagaccaggttgaactgcagaacacatgccctctttgaaggggtgcccacactcagctctagacaatcagaaccatgcagaaatcaggcccagggctgctagatcttctgacgtggaagtatgatattacctgacacgtaagtgttgacaactaactcaaactct

SEQ ID NO: 441 - DNA, 547 bp, homo sapiens
  misc_feature (528)..(528): n=unknown
gggaggaacagagcggccaggagtcagagcggccacccccacctcatcttcccctcctggctggaggctggcgaacccaggccacccctcccggagacaagcgtgtttggcagtgccaggcctcttgcccctttgcttggactccaagtctcctctctgggcagccaggacccacccatggggacagccctatttagcttctgctctgggaacagcaaaaatcaggatggtgggaggggccgagtcttgtcttgtcctttcatcatcatgactgttgagttcttggctgtgcccatcacgccacagcacgacgcctgccaaaatgcccccaacctactgcctgatgcaggtgccattgccattagcggtcatcgacagcttagggcagcactttccaacgggtgcccatgggacaccagcctgcgagatgcttttgtgggaaaggggtttgtggttcaataactttcggaagtgctgcacactctgtccccaagttggacattcacaaaggccgtattgccgtaaagnttctgacaagccctattag

SEQ ID NO: 442 - DNA, 530 bp, homo sapiens
  misc_feature (523)..(523): n=unknown
tccaaaacgggtgacttggaaacgacctattaggtcacacggagtccggcccctgggggccaaagcctcatcgatgcccacgggcggtggccagcactttcctcgggctgtggcgtgtgcacccggcctccccagcggagagtcagctcacaccccaggccctttagctctctggcagcagctcccaaaacgcacttgaggaaccaataattccttgggggttaatagctgttccccaagaaaagggttctgtggtcaaataagtttagaaaacatgggttaaagaaggtttagcaagaagcttttctatagggcttgtcagagcctttacggcaataacggcctttgtgaatgtccaacttggggacagagtgtgcagcacttccgaaagttattgaaccacaaaacccctttcccacaaaagcatctcgcaggctggtgtcccatgggcacccgttggaaagtgctgccctaagctgtcgatgaccgctaatggcaatggcactgcatcaggcataggttnggggcat

SEQ ID NO: 443 - DNA, 212 bp, homo sapiens
aaggaaaggacagatccctgctttggaaaaagaatacaaatgtgcaggtttgaaagttccccattaggtgcatctaccatttctattatattcaaatactaagctttttaggacttatattaaactccataatcttaatatttatgaccacaacttaacaattaatcaaactattaaacactaaaagagtcaaaggctgagtatgggtgggg

SEQ ID NO: 444 - DNA, 335 bp, homo sapiens
  misc_feature (331)..(334): n=unknown
cagatctgcaaattatactcattgctctctctccttctctttttttcctaaattaagatgagagcaatttccattaactttttgagtcacatctagtccacatgatatagagaaagggtaaaagaaagactgaaacagaagtaaaaatggaagaaaaagatttgatctgcaattataagtaatctgccttttgaaattagcttcctgagactcagtcctgattggagaactgttaaagtgtttcagaggagcaggggttgtctatccgagcagtgtctcctgaatcatactgaatacttgagaaaatcagaccagctttatttgaactcanatng

SEQ ID NO: 445 - DNA, 348 bp, homo sapiens
  misc_feature (287)..(337): n=unknown
catggggatcagttccagactttggtttgatttgaaacaagccaagcaaatttgcctgaatgtgatttcaaaaggttttcctgttttcctatttctctcatcaggagattgaaggaagctgagaagcaagtcactatttgagttcaaataaagctggtctgattttctcaagtattcagtatgattcaggagacactgctcggatagacaacccctgctcctctgaaacactttaacagttctccaatcaggactgagtctcaggaagctaatttcaaaaggcagantacttataattgcagatcaaatctttttcttccatttttacttctgtttnagtctttcttt

SEQ ID NO: 446 - DNA, 568 bp, homo sapiens
  misc_feature (487)..(487): n=unknown
gcgggcccccggaggccgaggggttcggcgacgcggagggagggagagtctgggccgcgcgggagccgcagggcgccctagccttcgcagaaacgatggcggaggaagaaggaccacctgtagagctgcgccaaagaaaaaagccaaagtcttcagaaaataaggaatctgccaaagaagagaaaatcagtgacattccaattcctgaaagagctccaaaacatgtattatttcaacgctttgcaaagattttcattggctgtcttgcagcggttactagtggtatgatgtatgctctctacttatcagcataccatgaacggaaattctggttttccaacaggcaggagcttgaacgggaaatcacgtttcagggtgacagtgccatttattactcctattataaagatatgttaaaggcaccttcatttgaaagaggtgtttacgaactgacacacaataacaaaactgtatctctgaagactanaaatgcagtgcagcaaatgtctctgtatccggaacttattgctagcattttatatcaagccactggtagcaatgaggatta

SEQ ID NO: 447 - DNA, 362 bp, homo sapiens
  misc_feature (199)..(346): n=unknown
ataccaataaaatataaacaaaaagcaaacaaacgcattttttaaaacttagctattaagaacatttcaattgtcaaaagatacatttgagtagaatataccaggtcaatttttctatttaacttctactccagcaatacaacatacatcggtgacatcaaataaggcagtcagacttctgtttattttatttcttacnattctcactaagatctctaaagagagtctnattcttttgtttaagtagcataagagagtctnattctttanaaccattatgtttacatgagaaagtatcttttcctctncaaatatgnagacagatatagggattacatgaaattantagcaaagttaattga

SEQ ID NO: 448 - DNA, 289 bp, homo sapiens
  misc_feature (121)..(121): n=unknown
  misc_feature (276)..(276): n=unknown
gtcggaggcgcgtggagagccagggtccgggcctgaggctggcgcccgattcttctgcactgcgggtcgcggcctggagccgttcgtaatgcgagaggtgcgggcgcggctggcggccacnaggttgaatatatttcaggaaaggtttttttcaccacctgttctgatttgaatatgttgaagaaattaaaatctgcagaaagattatttttgctgattaaaaagcagtttccactttattattcttctgtaagtaaagggaaaatatttaatganatgcaaagactta

SEQ ID NO: 449 - DNA, 276 bp, homo sapiens
  misc_feature (263)..(269): n=unknown
ataaaggtttttacatttccgaaaatctgatagttaaaatatcccgtctggtgttgattgtgatacacttaagtgaacccctgaaaacctttattttgaaattgaagtttttgctcagaaactgggcagaacttttcacattctgacagaagataaaacttaagtctaaaaaatattcggtaacttttttctcaaaaacattaagtactttagaatataaagcagaaactcttaccaagcatgtgtacccatcagccacaccncctgtntttgggg

SEQ ID NO: 450 - DNA, 339 bp, homo sapiens
caacaacaaaactgtgattctccatctaactttttacaattatcctttcacaattcaagaaagtgtgaatgcaagtcattactaacagtatctcagtaaaagtagtccaggagcaaatattttctttttaactgggttcccagctagttccattcccttgaattcagtggcaaagtcactgtcaataaaaggtttttactcttcttcctttttgaattgtaacttgcttactgaattcaggaattgggtgatcaaaagataactgcttattatagtaagataaccttggaacagaactgtgattaaaaacctgaataataaaaaacacacaagacccat

SEQ ID NO: 451 - DNA, 298 bp, homo sapiens
  misc_feature (142)..(266): n=unknown
acagttctgttccaaggttatcttactataataagcagttatcttttgatcacccaattcctgaattcagtaagcaagttacaattcaaaaaggaagaagagtaaaaaccttttattgacagtgactttgccactgaattcnagggantggaactagntgggnacccagttannaagaaaatatttgctcctggactacttttactgagatactgttagtaatgncttgcattcacactttcttgaattgtgannggntaattgtnaaaagttagatggagaatcacagttttgttgt

SEQ ID NO: 452 - DNA, 485 bp, homo sapiens
  misc_feature (36)..(483): n=unknown
gtgttgtgaaaactgagatatgtacacataccatgncctaggtgctttgtgtacatatcncagttttcacaacactgcaagaaggggattatcacacaaagnacctaggccatggtatgtgcttaataaatggtggctgtgcttggtgttacctgactctctactcatcctttgggatntgggtgnctgcntgtccgtccagatgnccgngagatctcacgagtnctctttgantgcaaagacctcattctcattatcnaaccaggctggtcccaganctcagagttcaggtnttcatgctggaatcctgctgaagcnntgaacgtngagtcaggagatgtgggtttgagtcctgagatttgctgtgattcatcnggncgatggggttttganaccttttttaaaggtatgaaatgatgatgtggaatgtttgtgcctagaaacgcatgtggtncatctcaggcatcttttcatctgancaanca

SEQ ID NO: 453 - DNA, 468 bp, homo sapiens
  misc_feature (92)..(107): n=unknown
  misc_feature (349)..(445): n=unknown
gctggagtcaggtggggctggggctcacagctctctacctgtttaagaggggctggcagtgaggatttctgcctacctcatgggtggggcangcaaggctaataganagctcatttcctgcatctgccactccgacgcaccttcttccctcggttccacccctcattcagccaaagcgctctgactgagtcccagaggcctcccgtttgcatttctggctcaaagtctgcagctggccctttccatgcagctggagttctgcagtccatggaacctgccaccatgatagtccagatcaggccacagtaatggtggctgggctgggagcctgagatgttagcaggaaganagctgctggggcagaaaggttgctgagggtgagcgtagagtctcctgtgctaaatccccgcagctgaacagcacttgaaggntacaaaactctttnaactcttggtctcttattgtgat

SEQ ID NO: 454 - DNA, 504 bp, homo sapiens
  misc_feature (28)..(28): n=unknown
  misc_feature (187)..(324): n=unknown
  misc_feature (458)..(501): n=unknown
ccccactccctccccagagcatcccganggccccgtcttcggacgaggagtgcttctttgacctgttgaccaagttccagagcagccgcatggacgaccagcgttgtcccctggacgatggccaggccggggctgccgaggccacggccgcccccaccctggaggacaggatcgcccagccctcgangacggnctcgccccagaccgaggaattcttcgacctcatcgccagctcccagagccgccggctggacgaccancgggcnagcgtgggcagcctgccggggctgcgaatcacccacagcaatgcagggcacctccgangccacggcgagccccaggagccgggggacgacttcttcaacatgctcatcaagtaccagtcctccaggatcgatgaccagcgctgcccaccacctgacgtactgccccggggccctaccatgccggacgagganttnttcagcctcattcagagggtgcaggctaagcncatggacnagc

SEQ ID NO: 455 - DNA, 591 bp, homo sapiens
  misc_feature (90)..(548): n=unknown
atgtacctcttgggttggaaaggacccattgacaacatggcacagacgtgagcaataaatacgcacatacattcaagtatgcgggggggngctangtcctggagancctgtgttcggncacctgtccctgctctcgggtgcngncctgcncctccagaagcaggtcacctcaccangnccagatctgcctctccatcctancctganagtngggcctagangnaccctcctagatggaactncnagcnctggnnnctgtnnnnncatggtagganccttngcagtcttgggaggtgccaaggctgggtctggacaggaggaggcaacctcaggcccctggngcccatctcaggctccagcaggtcctgccagtcctaggntcccgaacttngtgccctgtganccccctccccatggagagancngtgatgtcatctcccccagctggtnggaggntgggggttctcatatngngggtctgcnnggttgagctgagtgaagcctccccagcttccactgaccacccccccacttnggtganggtcncngagcctggtgctacctcccaccctgactgggcactgctcttgc

SEQ ID NO: 456 - DNA, 488 bp, homo sapiens
  misc_feature (454)..(454): n=unknown
aacggggtggtcatccacttgccaggcttgtttgaggaagcagagaagaatgaaaagaaaggcctgaaggactgggagaagaggctcatcatctctgacagagcccaccttgtgtttgattttcaccaggctgtcgacggacttcaggaagtgcagcgccaggcacaagaggggaagaatataggcaccaccaagaagggaatcggaccaacctactcttccaaagctgcccggacaggcctccgcatctgcgacctcctgtcagattttgatgagttttcctccagattcaagaacctggcccaccagcaccagtcgatgttccccaccctggaaatagacattgaaggccaactcaaaaggctcaagggctttgctgagcggatcagacccatggtccgagatggtgtttactttatgtatgaggcatccacgggcccccccaaggaagatnctggtggagggtgccaacgccggcctcctcggac

SEQ ID NO: 457 - DNA, 541 bp, homo sapiens
  misc_feature (495)..(495): n=unknown
tggacacgcaaccatgtgacactaatgtgtcatagaaggtctctgagcactttggctcattttgaatataatttttaaaaatatacacaaggctggctttccaatgtttaaaatcattgtagaaaccaacaggttgaacagaaatataaaagtacagaaaatggttttcctgctttggtgttggttgtggcggccgaggaacgtgactgctgctgtttacacaagtccagacgctgccagggcctgttgggatcagctcagtctgtgactaaaacagctggatcatcgactctcttgacttgccaacaccaacccatttgactgcgactcccacgtgattctccacaaagcggatgtagttctgggcctgtgggggcaggtcctcccacctcctggcgcctgtggtgtctgctttccacccaggcagcgtttcatactcaacttcgaccttctgaagcatctcctggttaagctgggaaatagggaatccttttnccgttcagcttgtatgagacaccgactttaacctcacccagtacgt

SEQ ID NO: 458 - DNA, 516 bp, homo sapiens
  misc_feature (226)..(226): n=unknown
  misc_feature (370)..(494): n=unknown
tcaactcagccccttgccctgtggcctgcaggtggctttgtacaagtcagtgccaacgcgcttgctgtcacgggcctggggtcgcctcaatcaggtggagctgccacactggctgcgcaggcccgtctacagcctgtacatctggacgtttggggtgaacatgaaagaggccgctgtggaggacctgcatcactaccgcaacctcagcgagttcttccggcgcaantgaagccgcaggccggcctgtctgtggcctgcacagcgtggtgaggcctgaccctttcctcctgcaggaaacaggactttttcctgcctccccagcacagcccccctggtctccagcgtatctggaaggggcaggatgacaagnggaggtgggggctgtctcctgnngggaggagaccctgctctccctggcagcaagcctctcctncncttccagattagcccatcggatggaaggatnctcaactttgggcaggtgaagaactgtnaagtggagcaggtaaaaggggt

SEQ ID NO: 459 - DNA, 490 bp, homo sapiens
gttcagaagtctcccacttttcatacaaaaatactgtgctactgatacagttgaaaaaattcaatgatgtctctcctgcaggagaaattcacagcatccccagggtcaacatgaaatctggccctgtccccgccactgggggctccccaggcctgcgttcctgataaactgggacaggttttccaggcactgaccaactatccaccaagggtcctctgcctccaagacagaccctgaatcaatagcagcaactttcccatatttcatgtagggatatgtggagggggacaggaactctcccatttccccagctgggcctactacctgcctgccctgttcactctggtgccatgaggcaggttcagtgattgattggtcttgcctgctgcagaggacctggccagctccagaagggtcactcatcaggtcctgcaaaggtctgtatcattaatcagtgtcatcagtgtcctcagaagacactagcagagtc

SEQ ID NO: 460 - DNA, 518 bp, homo sapiens
  misc_feature (12)..(12): n=unknown
  misc_feature (241)..(267): n=unknown
cctccctcctcnctccctccttccctgccttctttccttcgttctgccaacttgccagaaggagcccaagaaaaagcacccagatgcttcagtcaacttcttagaattcttcttttttttatgttcagaaaagatggaaattcatttctgctaaagagaaagaaaaaatttgaagacagggtgaaggtgaacaggcccattataagaaagaaacaaaaatctatattctgtctacaaggannnnnnnnnnnnnnnnnnnnnnnnnnnagaaagaagttccaggattctaatgtaccaaagggatctcctttttcttgttttgttctgaaaatttcaccaaaagagcacaggagaacatcttggctaattcattggcgatgatgtaagaaaactgagagaaatgaaagaaatgaagaattactgctgcagataatatacagccttgaggaaagaaaggctttaagattatagatataaaggctattgctgtattctggggataaaaagaaagtctgatg

SEQ ID NO: 461 - DNA, 163 bp, homo sapiens
  misc_feature (104)..(156): n=unknown
tacaactaacagaacaattatattaggtaagctgcatgaaaaacaattgaagagggaaaaataatatctccatatatatgtaattgatttgtactatgcactantaaagcntgncttagatttctgttctagtttaaaccccgaaacagtaccagncaaggtt

SEQ ID NO: 462 - DNA, 519 bp, homo sapiens
  misc_feature (387)..(500): n=unknown
tgatgatgacaccggtctgatagaagtctggataatcctgctggagcagctgacagcggctgtgtccaattgtccacggcagcaccaaccaccaactctggatttactctttgagctgttgagagatgtgacgaaaacaccaggaccagggtttggtatctatgcagtggttcacctcctccttcctgtgatgtccgtttggctccgccggagccataaagaccattcctactgggatatggcctctgccaatttcaagcacgctattggtctgtcctgtgagctggtggtggagcacattcaaagctttctacattcagatatcaggtacgagagcatgatcaataccatgctgaaggacctctttgagttgctggtcgcctgtgnnnccaagcccactgaaaccatctccagagtggggctgctcctgtattagatacgtccttgtgacagcnggccctgtggttcactgaggagatgtggaggcttgcctgctgtgncctgcaagatgcgttctct

SEQ ID NO: 463 - DNA, 87 bp, homo sapiens
  misc_feature (17)..(87): n=unknown
gatgaaagatataaganaaaagcccaaataagntgngccatantaangcacccacagtccancactaanaaaaanatgnaaattcan

SEQ ID NO: 464 - DNA, 320 bp, homo sapiens
  misc_feature (80)..(315): n=unknown
gatgcagctgatgacccaggactgcgctctgccccatcacagccagcatgactgcttctctgagagaacttgcccatcangggctgggacatgggggtgtgggtaaagacagggatgaaggatagaggctgagagaagaaggaagaatcagcccagcaggtannggcntctgggaaacctccagcctcaagtgtgttggtaacatgaaaaagctttggggggtagttggatctnggtgtctggtcccatnctggcagtggncattattcttgccctaagagacactgccttttcagcagcagatactggtnaganggggg

SEQ ID NO: 465 - DNA, 399 bp, homo sapiens
  misc_feature (79)..(79): n=unknown
  misc_feature (188)..(188): n=unknown
  misc_feature (306)..(362): n=unknown
taaaatactgaacatagtggttaaataactccagaaagtccaatctctccagtgagtaacgttaaaaccattacacatnagcatgggagaatcgcttccattagtttaggacagagagattttgctttttacagagtaaatcagtgctcaaatagatacttcctcaaatatgtcctttctacattctnaacagcccaagtgcaataagatccttccccctttccaatcaagaaaatgccacttttctacttgctcttcctccccagacatgagtctaaggacccaaagtgctcactcctttactgnttgttaagtgtaatgtggggaggctcagaactggggctgacgctactganagcaangctaagggctggtatctctctctagcagtcttagaac

SEQ ID NO: 466 - DNA, 445 bp, homo sapiens
aaattgtattattgggattagaatgtgctttatgacaggttagtgtttcctctgaggcagaaaactcttttttggagatatcttccatcaagcagtactcgtgcccatatacaatctcttagtggctaggagaaataaataaaagggccataatggtttgttctctttcagacataatttagtaggggacaagaagtctgttcttcagtgagtacactagagatttactctggtgactgccttttgagttatgggtgaagtaaggtacggctttaccataaccttgattcattcacccttgattcatttctcgcccccgtcactgattatttccttgagcatatatctctgcctaacactttagtaggtgctatagaggatacatggaaaagtatgagatctggttccatcccagtaagacattttaatagagaagatcaaaatg

SEQ ID NO: 467 - DNA, 437 bp, homo sapiens
  misc_feature (390)..(431): n=unknown
cttttattgaggttttacattgtagtttacagcaaatatactatccattgtagtgtatatgtacaagtaaagtaaacttaggtttgttttctctcccatggctggataaaccaaatctgatacatccacatttaaggttgttttccaagttggtttccataaaaggcctttaacaataataggcttttaacaacaaaaaggtatccctcccatcacaatgagagcttgatgagggctcaaaagtgacttcaaaaactgtaaataattattttccttggatggctttaaaaacagctactgatagcaaatcagaaacactaaagaaaaaagacaataaggaaacagctgtttgtctagtgaatccataataaataccaatttgaggctatngnttncaangccaaaatnttcttatgggaaagttaatgttnatgttt

SEQ ID NO: 468 - DNA, 392 bp, homo sapiens
ctacgatggcctgctgggtgacaatcagatcatgcccaagacaggcttcctgataatcatcctggccataatcgcaaaagagggcgactgtgcccctgaggagaaaatctgggaggagctgagtgtgttagaggtgtttgaggggagggaagacagtatcttcggggatcccaagaagctgctcacccaatatttcgtgcaggaaaactacctggagtaccggcaggtccccggcagtgatcctgcatgctatgagttcctgtggggtccaagggccctcattgaaaccagctatgtgaaagtcctgcaccatatggtaaagatcagtggaggacctcgcatttcctacccactcctgcatgagtgggctttgagaaatggggaagagtgag

SEQ ID NO: 469 - DNA, 267 bp, homo sapiens
ctacgatggcctgctgggtgacaatcagatcatgcccaagacaggcttcctgataatcatcctggccataatcgcaaaagagggcgactgtgcccctgaggagaaaatctgggaggagctgagtgtgttagaggtgtttgaggggagggaagacagtatcttcggggatcccaagaagctgctcacccaatatttcgtgcaggaaaactacctggagtaccggcaggtccccggcagtgatcctgcatgctatgagttcctgtgggg

SEQ ID NO: 470 - DNA, 516 bp, homo sapiens
  misc_feature (321)..(475): n=unknown
ggaaaagttcagctgctaaaaggctatggaacttgagtaagaggtagagatttggaagctgaagggggacgtgatttggaatgtgtgtatatcagcactttcacattctagacttagggatttttcttctgacttccagaagaaaattaagaatagcacatgtttcacagctccactgccaaggtcttctaaggctacaggccaggaattacagcagttgaccacaagtggaaaagagtctaagaccacacatccttaggagctccagaagaagatctaggtccacaacagacctcaggcccaagccttagctctggctgngcactcctgggctccccgagacagaagagcttgtngctanttaaatgctcatattgcctgggcagtaacccagagaaatggaactcgaatgttagaatggggaaaggncctgcnggggggcntatggaatatctcnatttgtacttgagagaanggcatattagtaacacctccgggcatataccctcagcagct

SEQ ID NO: 471 - DNA, 370 bp, homo sapiens
  misc_feature (351)..(351): n=unknown
actgtcttgattactatacttctagcttgcctttcttctattgctacagtcccccgatggtgttatacattaaatatccaggatggagaagccacatgctactcaccgaaggaggaaattatcacagcagcctgggcacgcgttgtgagctctcctgtgaccggggctttcgattgattggaaggaggtcggtgcaatgcctgccaagccgtcgttggtctggaactgcctactgcaggcgtaagttgtgtgtgtgcatatgctgatgtatgtatgcgagagaagccagccagccagctgctgagggtatatgcccggaggtgttactaatatgcccttctctcaagtacnaattgagaatattccataa

SEQ ID NO: 472 - DNA, 524 bp, homo sapiens
  misc_feature (315)..(315): n=unknown
tgttgaaattatgatcttaagcaacactgttagaaatgcttgcataaagtatcttctctagtattaatgagttgattcactctgaattgaaggttcaaaaaaatgcactaaacaaatatttttatatctgtggtattttcctgttaactactcttagtgaacacgtgaccatatacctgatatcattaaaaaggaaaatggcctaaacgaaacgttaaaagtggaggtatttataaagtcttctgccaaagaccattgtttaatgatctgtaaaatgtagattatcttcttttattatgaatgtgattgtaaganacaccctaacattctctaacttttgaaaatgaatattttgtatttctaaggaccaaggaaaatattttttaagccaatgtagtacacagaagccttgtaaatgagaggtacaatgacttggatcaactgcataatgctagattagaattccagcatttgatgataaatttatcaatctttcctataattcttatactgcactaaattac

SEQ ID NO: 473 - DNA, 134 bp, homo sapiens
ctaacatactatagattgaaaaattatagaatgattggtgaaagactttcaagcatgcaggtatatcacattcaaatagcattctgtggaggaagtagaatggaaaaaaagttcaaagagaaaaagagaagatg

SEQ ID NO: 474 - DNA, 119 bp, homo sapiens
ctctttgaactttttttccattctacttcctccacagaatgctatttgaatgtgatatacctgcatgcttgaaagtctttcaccaatcattctataatttttcaatctatagtatgtta

SEQ ID NO: 475 - DNA, 462 bp, homo sapiens
  misc_feature (426)..(426): n=unknown
ggagtgttaggggtacgtgttggggtgttatttgtgtaggagtgttgggtgtgtgttggtgttgacgtgtacttaggagcgttgtgtgtgtaggagtgttggggcatttgtgttggtgttgtgtgtgtaggagtgttggtgtgttgacatatgtgtaggagtgtcaggtgtgcataggtttgtgtacacacgttcacatgtagctcctctttgtttaattccacaaagcttcactcccaaactcagtgccaacttcctctctccgcactcaggggtccccttctcctcccaactgctccctccctgggcccctaagaagggtctgtgaccgtctgcccgagcctttgcccagcgacaggagccagtgcgcaggctccctttctgccagtcagatcacgctgtgcatctgcagaacggctccaggangctctgagagcagagagcaggggcttcctcctgctg

SEQ ID NO: 476 - DNA, 513 bp, homo sapiens
gcaagttgccctaagctaaacatagttttcttacatctttttgggaaaaaaaatggaatgggaagtatgcaagattaagcaagagtgatttttttttttttttgacaaatcaggtggccttcctaaacatactaagaattatgttctttcatgtgtggagacacatttgtttgcagcactttaaaaaatatatatggaataaaagtttacatgttggccctctagggatctaattaaggacattaaagtacaattcttgagctactaaccatcagctcttcttaatcaaagattgccatcagtgtagagtgtatctattggcacaacattctggtgttttgataacagtagaactcaatttcagtaactattaggagcatggtctgtgccctagcattaaaaatgttacttattattatgtgaatatcttgtattattatacaatgcagtattcaaatttgtccttgtagtgcagagatgactgataatttctaaaagattcgatccttaaaa

SEQ ID NO: 477 - DNA, 509 bp, homo sapiens
  misc_feature (293)..(317): n=unknown
  misc_feature (495)..(495): n=unknown
gtggcacctcccttctcccctgcagccccccacatccagagccgttcctgagagtgacatcatgcatcaagaaaacataaccttggtcctcaggtgaacccttggaacattctgtgaccgcctgatgtccattctgagccaccttggcacacatgcttacaggcagcactgctaagggttcaggtgccccatggctgacagcccgagttgcttctgtggaccatcatgccgctcggcacgtcctgagacagaagttgctgcaggaaggagcttctggagaggtcctgtggcannnnnnnnnnnnnnnnnnnnnnnnnttccttcttgaacagacattccaactttagatgtgtttatagaactgacctttttactaacaaaatacaatgatatatgttggaaactacttaatatgcttttcctgcacaccttagcaataactgtaggggtctctgctagagttgtttgtatgtacagcaattttgaacaaattgntttaaatgtaatat

SEQ ID NO: 478 - DNA, 466 bp, homo sapiens
  misc_feature (332)..(456): n=unknown
gtccaaaccttttcgagagtaaaagggtgccattagtaattacatcaggaaaacatatcccaggcaaaccaggatatatggtcagcctacttgatgcattatgaaatgcggtgattgccgagttctgtcattctcacctctaagatatctctcatgtccatatcctcttttccattctgactaattaagcctcaactgctattaccagtgaccttctaactgcttttcctacctttaagctattctcaccccctccatccttgtgatgcattattgccatcgtgatcttcccgaagcatagctctgactatggcccatctcagaaaacctanagtggctcaccattgcctgatggtggagttnagagcccttgagctagcatttcattatggnccgtnatttttccccgcancactttcnagggttgtggaccacaattnggnntgggccttaagnatggaatgaa

SEQ ID NO: 479 - DNA, 227 bp, homo sapiens
  misc_feature (40)..(207): n=unknown
ctttggttctccccttatgtctgctgctcgtccaggtatnaanangacctcatcacggtcactctcatgtgtgctttanctgggaaganctnactctngccatgactctngcctggctggnctagctccgggatggggaanancaaagggaaggggagtgacagcntctggnaggggaccgcagacgtgggtggggcattctccagnggcatttggtctcctgcttt

SEQ ID NO: 480 - DNA, 522 bp, homo sapiens
  misc_feature (446)..(504): n=unknown
agacactcaatcccatctgcctgattttggggtgggcctggtagcaccgccatgcttatttaccataggattccccatgcacaaagccaccggcatttggctgtggggtgggaggctaagatgaaacaggacttgagtgacacctggagcaggtaagggccatcacctttagccttcaccctgtacttgccatccaggcaactcacaggttaatacagaggtgccaggctctggagcaagcttaattgacaggaaggtgtgggctggatcctctggaagctataaataaaagtacctgcttttgcaggcacaagatgccctcaccactagctcctgggcaaggggaggagaaaaagaggggagaaagaagagaaggaggtgacatttagaaaaaatgaggggtgccaggaactgtgcttggaagaaaggattggaaagcaggagancaaatgcccctggagaatgccccaaccacgtctgcggtccccttccagacgctgncanttcccttccctttgctct

SEQ ID NO: 481 - DNA, 515 bp, homo sapiens
  misc_feature (432)..(452): n=unknown
aattgtagtaactacctaataacatgattgtaaggattaaattatttagaacactatttgttacttggaaaatatgcaatcataagctattttgttgttattgttattttactaccaaagcttattgtttcagagcccctaggtgaccaggcaaaatggcagttccttccagctggtcctcagatgggcacatctattagcctctgctcttgtaagaagttagctgcagaacccacatgtgaatccttgtaggactctggagaagatcaaatgggagcttagatgtggaagctctttggaaaccaagaaacactctgaaaatgaaaagggtggaagagtaaactgttcctgtttctccatcttgacaggaagcagaagttctccttagctgatttttcttcttgccttatactgggttctttaacaccagannnnnnnnnnnnnnnnnnnnnggaatcttccagaaattcatgaagagacttcagggcaggaaagcctgaactttctcatccaac

SEQ ID NO: 482 - DNA, 286 bp, homo sapiens
  misc_feature (279)..(279): n=unknown
atacttatacataaatctagatgcatttgttcaagtttatctccagattcaaatcttagacataagattattgggtcaagaggacattagcatttaaaattttaacatacatgtttaaaaatagaaataaaattagaggttgaaggtctttgccctcccatccacagtatatgggaatgcctgagtctcattgtatctttgcagttttgctcaagtgatggctgaaaaccagtatttcatttttattttattctgaatgtcacacatttttttattcgnccagatg

SEQ ID NO: 483 - DNA, 237 bp, homo sapiens
ctcccacacaaagcaggtggcctcgatctccgagccctcagatcgttgtgcatccgtcttctgacacacacacctgccctgggctcttaaggacttgggtggactgaggggtgggagatgccaactctgactgaacgatgcctgcagaggaatcaaaggtgccacacacggcaatcttctctctgttttctgcacagcggactgcccaagccctcggtcaccagcaacaactccaac

SEQ ID NO: 484 - DNA, 496 bp, homo sapiens
  misc_feature (8)..(68): n=unknown
  misc_feature (195)..(224): n=unknown
gcgggacngggaggtgntagatgtagaatgaaaantcatatatttatgagagaggttattttaatggntgaattatttgtgtcacagctcagctttttggaagacaaactcaaacacctataatttcatttatatttctaattcacttggaacctttctgctttatggtacctagaaaatgataatttgtgtaanccaaaacttctaanatnaatngcttaatncttgaaatatgttattggaaaattttaagcagtgcttaaacaccattaaattattatgaacttgtaattcagaattgagtaaagaaatattttttctagtccttcatatattgaaaacttgccacatgacattgtatcgtcttcattttccagaagatgcgttggtgtgccatagggttctaacttccttgaaaataggtttttaagtcaattgtaaatatacgtattattgttaaaaagtaactttaaactgccacacatagctttcaaac

SEQ ID NO: 485 - DNA, 466 bp, homo sapiens
  misc_feature (92)..(158): n=unknown
  misc_feature (272)..(272): n=unknown
  misc_feature (373)..(452): n=unknown
caaacatcacaccaaagatgagggtagcgagcaactggcttgagcagacagaacggggaagactccactctgtcccgaggggccagccgcantacncccagggccaccctgccctgaggtccttgtgtggccgccctggcttggcagccctgcccacnctgcccccgcaaacaatggtgtgtgcgtttttacagccctttttaggaacccaatatgggcataaatgtaacacctatagcgggggcagattctctgtatgttcagttaacaanttatttgtaatgtatttttttagaaatcttaaaattgcctttgcactgaagtattttcatagctgtttatatctcttttattcatttatttaacatactgnctaattttaaaaataggnttttnaaagctttcatttttaaggttatggnaattttgggcactttaacatttagattctngtgagagtttgact

SEQ ID NO: 486 - DNA, 378 bp, homo sapiens
  misc_feature (44)..(70): n=unknown
  misc_feature (321)..(347): n=unknown
ctgaagaagcgcatctccaacatcaaccgctacctgacctacancctctacancaacgtctgccgcagcntctttgagaagcacaagctgatgtttgccttcctgctgtgtgttcgcatcatgatgaacgagggcaaaatcaaccagagtgagtggcgatacctcctgtctgggggctccatctcgatcatgactgagaatccggcaccggactggctgtcagaccgggcttggcgagacatcctagcactctcgaacctgccaaccttttcctccttctcttccgattcgtgaagcacctctcagaattccgggtcatcntcgacanccttgagccccaccgggangcctttgcctggcatctgggaccagtaccta

SEQ ID NO: 487 - DNA, 258 bp, homo sapiens
tgagtctagtagtccagggcacagatgagggccacaccacgctttatccagtgtcgctggggctgatgggtggggatctccacagcaatgacatagttggtagagtgtcctgtggttgatagtgttccagcacgagtcagtgtcttgtagatggggcacaggtaaaagtcctggtcctgggccttgcggttgggtgttggcaagagccagataacggccatctctgtgtacagctccttgggctgagactcagccagc

SEQ ID NO: 488 - DNA, 321 bp, homo sapiens
  misc_feature (14)..(317): n=unknown
ggaacctgtactgnacagacacaggtcgaaataccatngaggcgtccangctggatggttcctgccgcaaagtactgatcaacaatagcctggntgagccccgggccattgctgttttccccaggaaggggtacctcttctggacagactggggccanattgccaagatcgaacggncaaacttngatggttctgagcggaaggtcntcatcaacacagacctgngttggcccaatggccntaccctggactatgatagccgcagatctactgggnggatgngcatctggaccggatcgagagtgctgaacctcaantggg

SEQ ID NO: 489 - DNA, 102 bp, homo sapiens
  misc_feature (3)..(97): n=unknown
ccnaanatactgaacataaccggnaaaatancnccagaaagtccaatctcnccagngtgtaacgnnaaaaccacnacacatgagcangggagaatcncttcc

SEQ ID NO: 490 - DNA, 416 bp, homo sapiens
  misc_feature (383)..(393): n=unknown
cctgttttagaaagttatgtgattagatgtgcaaaaatagcatctattttcacttgcttctctgctgagttcttctttgtgcatgtaaactagccaggctttctctgctagagatggccatcccaacatggcttttgcttactccttctacccagtagacccacctcttccatatcaggaggagataatcatccattccatgccgagagagggtgagtgacagctttggtctgtccatcctcctgccttagtgctcaggaccctggggagaggagcaggaagcccgagccttgagaagcaggaggaggtgggggcaggctgtgagctgacacctttcacacctcgcttctcttttcctttcagttattttaaaaggaagagcnacaaattgtnctttctcatttcccctatatcct

SEQ ID NO: 491 - DNA, 425 bp, homo sapiens
  misc_feature (22)..(412): n=unknown
gcagggtggggttccccccatntgaccctntanggctctggggtgactcnttcttnnttgggntcanangtggagctgatatttgttcctccngttgagccctgctncccctggnncttggcgttntcagtgtctccanacactananccacgttcntcnnataattgatgttgaancagttgacntgttcatccccaggactcaggtaacancanagggcagggtctngccanatgttacgtnggggaccacacanntcattgatnaaggttaatttctcctnntntgcncagcaggcntgttctggaaatggcaggtcacagcaccgggcagtcatgttgtggatcancccangaatatgtttatgcttgggtgannactctttggtttccncagangtggcccatnaangttgggggtgact

SEQ ID NO: 492 - DNA, 384 bp, homo sapiens
  misc_feature (242)..(340): n=unknown
gaatggggtaaaacttaagaaggtccaagagcggcagtacaaccctttgcccattgaatatcagctcaccccttatgagatgttaatggatgacattcgctgcaaaagatacaccttgcgaaaagtgatggtgaatggtgatattccccctcggttaaaaaagagtgctcatgaaatcatcctcgacttcatcagatccagacctcctttaaatccagtctcagccagaaaactgaaaccanctccaccacggccacggagnctccatgaaagaatattagaagaaattaaagcaganagaaagctgcggcctgtatcaccagaggagattagacgtagnagattagatgtgactacccctgaatctacaaagaatcttgtgga

SEQ ID NO: 493 - DNA, 513 bp, homo sapiens
  misc_feature (19)..(71): n=unknown
  misc_feature (446)..(497): n=unknown
tttaaaaagcacattctcntangnntatatttatatacatatacaaataccatttccttcccccttgtncncttctgggtagtcattttaaaaactcaagcctggggtcatcaaaaggggtagatttatactcccacctaactgtctggagtatagagttcagatagtctcttaggaagttttataaatgagattcacccagtacaattctgaaagctcttaaacaggagtctttaaaataatgtaaacacttaagtaatcaataagggttctctggtggcccacttttacatgcaaatacagaccaactgttaacatgcattattttagtcaactggtaaagtttatttcataagtataagtaattttaagccttttactaaactgtaaatttcaatccattaaaaactactaccggagcagttttgaggtattactgtaatttngtatagaaatgttactgtattntgatgtggttgaaatgcagccgtnatgcntttcatgaaacggtgc

SEQ ID NO: 494 - DNA, 441 bp, homo sapiens
  misc_feature (388)..(428): n=unknown
tgccacctgcccccaggtctgcgtagatggtgaatgtcatatcctgggtagagtggtgcggccagggccagatggggtcccacagagcacgctccttggtatcctgctgcctttgctgctgcttgtggctgcactggcgactgcactggtcttcagctactggtggcggaggaagcagctagttcttcctcccaacctgaatgacctggcatccctggaccagactgctggagccacacccctgcctattctgtactcgggctctgactacagaagtggccttgcactccctgccattgatggtctggattccaccacttgtgtccatggagcatccttctccgatagtgaagatgaatcctgtgtgccactgctgcggaaagagtcnatccagntaagggactggactctgcgctcttggctgaggncaaggatgtgctg

SEQ ID NO: 495 - DNA, 441 bp, homo sapiens
  misc_feature (319)..(395): n=unknown
gggtcagtgttggtgtggtcactgctgagtccactgtgcccagaagacagggtccacagcaggcactccataaatacatgttgcaggactgccctcactggctcactctgtggagtgagggacctaatgggccccatttacctattgcctctgaaagttaaagggcaggaacaaggtggagggccactgccctctggcctggcatggcccagaggcagcttggggttagctcaaggcagctaagcaggtccagcccaagaactaagtcaagtgggccgaggaggctctgagagtggccggggccggcgtacattccctngcatgggtgagaactgcggctgttcttgacgcacattcatctcatgcgaggtgctggggcccnagttcatgtaggntgctggcagctgcacataatggtccccaagcagtgcagacactatc

SEQ ID NO: 496 - DNA, 359 bp, homo sapiens
  misc_feature (2)..(353): n=unknown
cnttttcaaccnccttaaaattcnctcgngccccanaggaagcncttggantaaagcncagaaagtcattacnaattctatctggaanccagaaaataaggngganccaaagatgacnccaaacttggganactgggnanactggatggtgatgctgttgaccanaataggtaatagaagaggagtntcaggttttaactganagggaggcttaggntggtganaanaanttcagctttanacttnttgantttgaggngcccatgaagtctaagnggagctatntaaaaggcaggnggaaatgcgaatgtgganttctggaaaggaatttgggattncagtgtaaacttgnnttactt

SEQ ID NO: 497 - DNA, 494 bp, homo sapiens
  misc_feature (31)..(31): n=unknown
  misc_feature (267)..(336): n=unknown
  misc_feature (476)..(476): n=unknown
ataggtagaggcctttcctacagggtctganaaggccaccatggtcatttcttcccttctgtcaaacataattcctcggtttggccttcccacctctatactgtctgataacagaccagcctttattagtcaaatcagccaagcgttttttcaggctcttagtattcagtgaaacctttatatcccttacagtcctcagccttcaggaaaggtagaacggactaatgatcttttaaaaacacacctcaccaagctcagccaccaacntaaaaaagactggacaatacttttaccactttcccttctcagaattcaggcctgtccttggaatgctanaaggtacagcccatttgagctcctgtatagacgctcctttttattaggccccagtctcattccagacaccagaccaattggatgtgccccaaaaaacttgtcatccctactatcttctgtctagtcgtactctattcacnattctcaactactcatac

SEQ ID NO: 498 - DNA, 249 bp, homo sapiens
  misc_feature (19)..(19): n=unknown
ttcctgccttcttatattnataagaaaaataaaacaaaatagtgtcgaagtgttggggcagcgaaaatttttggggggcggtgtggagagagagaatgggcgatgtttctcagggctgcttcgagcgggattcggggcggcgtgggaacctagagtgggagagattaagctgaagggaggtcttgtggtaaggggtatattgtgcggttgttagaagaaacattcgtcatttagaattattggtgatga

SEQ ID NO: 499 - DNA, 390 bp, homo sapiens
gccttctccgtcctatttatcactaccaaggacaggttacaacaacctcagtttgactttggcaagttataatcatcagacctcgcagatctagcagctggcagccctccagatcagataatgtaccttatttgttttcaagcctgatgcagaaaagagaaagggcttaataagatccttaaaagagtgtgtttttccaaaaggagccgtcaggtggggagagggcagggtggccgtggctcctggctgctggtcccaaacccagtccctgtgtgggcctggaaaacttttttggcctcagggccatacctctttctgctttccttggattccattgcttttgcattcaacaaacaaaagggtctgtgtgagatacttgttaagacatgt

SEQ ID NO: 500 - DNA, 344 bp, homo sapiens
atgcaaaagcaatggaatccaaggaaagcagaaagaggtatggccctgaggcaaaaaagttttccaggcccacacagggactgggtttgggaccagcagccaggagccacggccaccctgccctctccccacctgacggctccttttggaaaaacacactcttttaaggatcttattaagccctttcgctgttatgcatcaggcttgaaaacaaataaggtacattatctgatctggagggctgccagctgctagatctgcgaggtctgatgattataacttgccaaagtcaaactgaggttgttgtaacctgtccttggtagtgataaataggacggagaagg

SEQ ID NO: 501 - DNA, 436 bp, homo sapiens
  misc_feature (13)..(13): n=unknown
  misc_feature (184)..(184): n=unknown
  misc_feature (331)..(406): n=unknown
ggaaggggaggancaggccacacaggcacaggccggtgagggacctgcccagacctggaggtggtgacttccaagagtgactccgtcggaggaaaatgactccccagtcgctgctgcagacgacactgttcctgctgagtctgctcttcctggtccaaggtgcccacggcaggggccacagggnagactttcgcttctgcagccagcggaaccagacacacaggagcagcctccactacaaacccacaccagacctgcgcatctccatcgagaactccgaagaggccctcacagtccatgcccctttccctgcagcccaccctgcttcccnnatncttccctgaccccagggggctctaccacttctgcctctactggaaccgacatgctgggagattacatcttnctatgggaagcgtgacttcttgtgagtgac

SEQ ID NO: 502 - DNA, 504 bp, homo sapiens
  misc_feature (454)..(485): n=unknown
gtccctattagctaaaagcccattaagacaagaaacacaggaagcccctggtcccagagaagaagcaaagggccaggtagaggccagaagggagtctttggatcctgtccaggagcctgggggccaggcagaggctgatggagatgttccagggcccagaggggaagctgagggccaggcagaggctaaaggagatgcccctgggcccagaggggaagctgggggccaggcagaggctgaaggagatgcccccgggcccagaggggaagctgggggccaggcagaggccagggagaatggagaggaggccaaggaccttccaggggaaacactggagtctaagaacacccaaaatgactttgaggtgcacattgttcaagtggagaatgatgagatctagatcttgaagatacaggtaccccacgaagtctcagtgccagaacataagccctgnagtgggcaggggaatgtacctgggacaaggncattctgtgcccctgctgt

SEQ ID NO: 503 - DNA, 531 bp, homo sapiens
  misc_feature (4)..(32): n=unknown
  misc_feature (311)..(449): n=unknown
actnacgntctccctnnccngcacaganagnnctgatacctactgggaccaggcagggggcacagagatggtccttgtcccagcgtacatttcccctgcccacttcagggcttatgttctggcactgagacttcgtggggtacctgtatcttcaagatctagatctcatcattctccacttgaacaatgtgcacctcaaagtcattttgggtgttcttagactccagtgtttcccctggaagttccttggcctcctctccattctccctggcctctgcctggcccccagcttcccctctgggcccgggggnatctccttcagnctctgcctggcacncagcttcccctctgggccnaggggcatctcctttagcctctgcctggcctcagcttcccctctgggcnntngnanatctnatcagcttgnctggcccccagntcctggacangattcaaagattccttctggcctctaactggccctttgcttcttctctgggaacaagggctttctgtgttctgtcttaatgg

SEQ ID NO: 504 - DNA, 387 bp, homo sapiens
gggatttgcccccatgatctacgcagctcctgccaagccccacctcattacatttccacatgagatgtgagtgtggacaaatgtttaaactataaggataaaaagcaagatctttaggagataagcatagagatttaggagattagcctacctgtcatgttcaagtttctatgtaggactcatatgatatagacccttgggccaactttaccctgttgcatgccccgtctctcacatgccttcgagtgactggtatgtagtgatgattttatcagtgaggatcctggtagtaataggtggattttttttttctttttgaagatagtttattgaagggactgttttcagaggtgtgaccatggtttaagataaccaagaaaggatgat

SEQ ID NO: 505 - DNA, 303 bp, homo sapiens
gtggttgtttctagcaagtttttatgtacatttattatggctgctacgtttttagatctacatgtatctggttgatgtaaaatcatgactctcctatgacctgttctaatctaagcttgccagcagatgggcttacacctaaaataagaccagcttctcgcctactcattttctgttcaaatcctcctttatagtaggatgaaaagctaggagttgaaatcttctttgcagtttctgtgataacttgttctagaggtttccagatccgaaatgcgtaggacctgcaaatgcaagagctgcaac

SEQ ID NO: 506 - DNA, 504 bp, homo sapiens
  misc_feature (49)..(49): n=unknown
  misc_feature (266)..(424): n=unknown
aaaaaacaaaacaaaacaaaaaagtgttatttataggaataagaactanaatgccttgttaatatattgttttggcattgccaaatttagcctatttgagtgcatggattgcatttggggattgctgttttcttttttgttttgtatgtttgctttagatgcgtagacagagggagtggagtaaggctttacagagattactacagaaggcatttttttttttcataaagaggggaaaacgcacccatctcataacaagaatttgnngtcnaaacgagacannnnnnnnnnnnnnnnnnnnnnnnnnnnnnnnnnnnnnnnnnnnnnnnnnnnnnnnnnnnnnnnnntttcncatcagcagaatgaaagcgttggcctanagacacccatttaaatcccncctccaaatactcattcgttcganattttctcagtgtctactaagcacaatcattgttaataaacactatgattcttggagagctccaaatcgtgtctctgctt

SEQ ID NO: 507 - DNA, 557 bp, homo sapiens
  misc_feature (428)..(428): n=unknown
aaaacggcctatccacgcccagcttttccctttggtggcttctccaggcccagaaattcctcagttcggcttcgcaaggtgaagttgctgcctccctgtgccttctccaggcccagttcttcctcccagctgggtctacagtcccatctcctgactcaaaacaacctattttggctcggctcctgcccagcacctggcggcctttgtaggcctaaagcttcctcaagtcaagcgttccaggcccagatcatgctgcccaggggccttcacaggcccagctactgcctgacgatggcttccccaggcccaggtccttgccttcccccagcctcccgaggcccagcccttgcctcacagttgctttcccagtccacgttacagcctgttacccgacggccttgacagaccaaactcttccttcacactgnccagtttaggacaagctcatacgtcttccagcctctccaggtcaagcttcctgcctcacactggcctctataggccaggtgctgaatcgcaatggtctgtttaagtcatctcatgcctttctcaaactc

SEQ ID NO: 508 - DNA, 409 bp, homo sapiens
  misc_feature (113)..(150): n=unknown
  misc_feature (151)..(405): n=unknown
tccatcatgataaagagttcaattctctgtgaaaacataatcataaatgtatatatgaacctacctaacaagagctcatcaaaatatgtgaaacaaaaattgatagaactgcnnnnnnnnnnnnnnnnnnnnnnnnnnnnnnnnnnnnnnnnnnnnnnnnnnnnnnnnnnnnnnnnnnnnnnnnnnnnnnnnnnnnnnnnnnnnnnnnnnnnnnnnnnnnnnnnnnnnnnnnnnnnnnnnnnnnnnnnnnnnnnnnnnnnnnnnnnnnnnnnnnnnnnnnnnnnnnnnnnnnnncaaggtcacatagaatcttcatcgagatgtaaaacaatcttgagcataagaccactttaaccaaattaanaaataacaggaattatatanattatattctcagactataanataa

SEQ ID NO: 509 - DNA, 543 bp, homo sapiens
  misc_feature (446)..(446): n=unknown
caaacaaacaaaaaaactctatcacattgtacctcaaaaatacatgcaattattatttgccaattaatgaaaaacaaaacttttgaaaaggaaagtcaccttaaatcaattaggtgaatcagggatgacctcttagaagatgtatacctacactgagccatcaatgctgattaggaatttggcaggtaaagagaggtggagaaaggaaaaaacaaaaagaaatggcacatgtgaagaatggcctattcaaggaaaagaaattgattatgggtggtgtagggggacagataggacaactaggaaagactagagaggcagccatctgcagagcatacagtgccatccaggccatgtaaaaagtagagctttactactaagaacacttgggaagctattgaagaaatataggtaggggagtaacgtgataaatttgcattttagaaagnttatttaggttgtagaatgaagagtgggttggaggggttaagaatttgaatagagaaattagtgaaaaaatgttgtaaccccaaggaagggtgatgt

SEQ ID NO: 510 - DNA, 533 bp, homo sapiens
  misc_feature (257)..(510): n=unknown
tcttttactatagcaacctctgcataaatagtctctgttctcatctgagtggtctttgtttatttctacaaacctatggatatactatcaatatatgaatatttgctgcagttttgtgtataataattaaaatgtaatctaaaggccatcattcaggactggttaaataaagatacatccatgtatcattatacagtggtgcaggagataaaaatacaatcaatctttgtgtttttaagggcaccagatattttttnnnagtaggtaganaatgggtcaggnaanntcccttttctgnacnttcnaaaggangaatacagaatatgcancngtntttgnttnggatacttnagatgactctattgctagnggtattttgtagtattagggaggaatgcacagtgaggaaagttactttttattccatanaattaatctatactatactatttgaacatatgcatgtcagtaagggttgcattgtctttntacttttatgcactgaanacnatagttgttatttcaaaaatata

SEQ ID NO: 511 - DNA, 544 bp, homo sapiens
  misc_feature (140)..(356): n=unknown
  misc_feature (514)..(514): n=unknown
gcctggtctgtggtctctcctagtcatttataaaacatgaatgataaagaaaaacagcctataatctaaaagacaaaattacaaacatgctatgtgacccagtttctaggacttaacttccctcttgacataataaattnnnnnnnnnnnnnnnnnnnnnnnnaagacaggatcttgctctgttgcccaagttgacctaataaatttcaagagtcctaaaattttcttttttaagacaacatatcactgtgctccatgattgatagtggggctccgtggtttctgccagnnnnnnnnnnnnnnnnnnnnnnnnnnnnnnnnnnnnnnnnnnnnnnnnnnnnnnnnnnnnnnnnnnngctgttcccaaatgacctttcacccagtgaactagcatttaatgaggaatcttgcctgaatcccttatttcttgggacaaagtgttaattttctaattttatcattccctcaacatttattaataaattatttattagcaagcattcttctggagggntttcctctttgatttattttttatcagtat

SEQ ID NO: 512 - DNA, 457 bp, homo sapiens
  misc_feature (89)..(89): n=unknown
  misc_feature (93)..(452): n=unknown
gcaaggtggcggccatctgtctgaggctgggaatctgtctccagccaaggccagagacaggcacgtccaaggaggaggggttggggcangagngctatgctgaagggattggctnnacatanatattcaacaggtaanaggnggagctatgnatattcattaaggtggtcctgacacatgccctcttattgagcanagcatgtaatatatgacccatgttcactttggggtggagacttaacatttacacatcttacaattagggcctttatggcanaacgtcttttcaggacanaaaggcatgcangtgcatcatctctctctaataacgggtcagctggncggcatggtcagctggncnnnggnctctnattannnnaatgtcnctgtaatnagtntctngtcnaatnncagctgctatggctggtganncagantcagttagttgncanctagt

SEQ ID NO: 513 - DNA, 535 bp, homo sapiens
  misc_feature (197)..(197): n=unknown
gtcccactcgaacatctccattcactgtccacttttgtgtttcacagttgggattacaactgtggttcatgaagcgagaataatttccttttgggccggcatcaattatacggtccttcagaaagaaaagaaaagtaccttttacataaattaagtctctcccagaaacatccaactcagtcaaggatcacaggcancagcattttgctaccaactggtgtttgacaactgacagatcaggaaatgtgaggctgcctgggtaatttactaagttctctcctttatttgatgaccttcaagtcaaagtaattaggataaagtgggatttagttgctttttaagtttgcttctagaaacaaatagaccatggaataatgctatttagaagattagtgggccagaggtttaggaatggtattttctgattagagatctcaaagttctgataactgctctgttgttttgctgtcagccttccttttccgctccaagcaggaagcaaaactagtataggagggggtacatgagagcttag

SEQ ID NO: 514 - DNA, 112 bp, homo sapiens
  misc_feature (24)..(110): n=unknown
aagattggtaagtccttatagagnntattgacctagattgaatgagcagtgcttttnaggtnnnaaggttaatgattatgtaattatanacacaanatgttgnatgtncnat

SEQ ID NO: 515 - DNA, 485 bp, homo sapiens
  misc_feature (271)..(468): n=unknown
ccctttttccctgtctcaagctgctcctcctcccctgactcaggactggctgtctcatccccagcccttttttgccattccttcctactctggtcagtaggaggcaaatgagagggctcagcaaaagccccacaagctcattcttctaaggcaggcgtgatcaaggctgcctgattgtcactgccaacttctgtgaccaaggtagacctcttctttctcctgcaggagactcgagtccgggcaggggagctggaccaggctctaggacggnncttcaccctaagcatcagtaacccagtatggggatgatgaggtgacacacaccttcagacagaaagtcgggaagcactgcagagctggatggangctctgtggcagcttttctttgacatgagtaagagagaagggggctgggttgaacctttnggaaagaactggagtttgtcatttttactaaaaggcctctgnttcaaagattatgtgga

SEQ ID NO: 516 - DNA, 295 bp, homo sapiens
gggaggtatgtttgctccaagggttcttcagtgccatcctcaaagctggttagtgcagggaggtagggcagagttggttccagttttcttccaggaagggtttagggaggtcccagcgagccccaggaatgagtccctcggtaccatggcaaccacaatttaagaggggcttctgcccacccctgcagcctaccccaggtccagcagaggaacaggaggccagactggccaacttgctataaacagcgccgtatccagagcccaactgcgcatgggtcattttctcttctgggca

SEQ ID NO: 517 - DNA, 449 bp, homo sapiens
  misc_feature (442)..(442): n=unknown
atcacattgtacagtgtggtacatctgagaagcagagagcttataacatatacttggcaataagtcacaaaaacattcgtattttttaataacatttttgaaggagaaaaatctgtttttcaataaattctggcgtggtttccctccagattttatttctcatttaaaatgaccttggggtcgattcttttcttcttctgttcgttggctctttacgaggtctttgccttaaacagatacattttagagatggattaaaaaggggactagctcatgagcatagaattcccgatttccttctgtttccacttctgatgagttgtggcagcattaacaccaatgtaacttaattttacagaaatttttgtagtcggtgctactcataatcaggtaaaattatcttcaacacatttctttgttaccgtaatatatttggctttcnttgtgga

SEQ ID NO: 518 - DNA, 430 bp, homo sapiens
  misc_feature (12)..(418): n=unknown
aataataggggnaactatgtaatgtataataaattcagagttttaccaataaaaatagtggcaacctaccactttangagaaagattctgcaatttacacaatnatgtatagaaataaaatagtccacaaagaaaagccaaatatattacggtaacaaagnaatgtgttgaagaataattttacctgattatgagtagcaccgactacaaaaatttctgtatcattaagttacattggtgttaatgctgccacaactcatcagaagtgggaacagaaggaaatcgggaattctatgctcatgagctagtcccctttttaatccatctctaaaatgtatctgtttaaggcnaagacctcgtaaagagccaacgaacagaagaagaaaagaatcgaccccaaggtcattttaaatgagnnataaaatctgga

SEQ ID NO: 519 - DNA, 372 bp, homo sapiens
ctgaaatatgtcaggttgaatcaataatagagcacaccagaactcttggctccatttcaacctaaactattcagttctcatcaccccagaggaaattccgcctctgtgctggtcagtaatccccctggattataaaagtttaactaactcactgtgcacaaggcacggccattgccaacattctcttgcaaggtattttcccaagcccttacccaattctgtttccatgattgtgacattggggattaattctgcaagacagaactgtttatattctgtaccttaaaaacacatgcaaacatctcttgcttaagattctggcttcctatggcccagagtcctagaagtgtttgatatttgtagcagaatttc

SEQ ID NO: 520 - DNA, 478 bp, homo sapiens
cctgacctgctggacactgttaattgggatgaggtcaaagaaggcatagttaccacatttgcaggagaccctaacctggaaatagtaaattacataacattctttcaagtgtctcctcttttaaaaaagtattttgatatagtttcacacagagaaaacttgcaagaactcttgtatatcctttacccagattctccaactgtcaatactttgtcccatttactatttgctttagacattttgagatttgtttttgaaccatttgaggaaaacatcctacccttctacccataagtactttttcagtgtgtacatcttaagaatcaggactttctcttccataaccacagtccatcagatgcaggaaataagacaataatgcaatactatgacttagcccacagttcatgttcaaatcttaccgatcaccatgcctctttggtcttgcttaatctgaaacagtcagattttattggac

SEQ ID NO: 521 - DNA, 252 bp, homo sapiens
  misc_feature (10)..(246): n=unknown
attagaaganacgntaatcnngcaaaatcaccattttgcaaccatcttggtaattgattcagcaanaatcatcaattgaggctgaaactagtaggtgaaagnttgatnaggaacaggatacttagtttcaaagtatccctccagaaattacttattanaaggaaaaacagtatcttcacaatgcggaaaacacnaccttaactgnnaaaagttancagcagcanggaaagngcagtcccacatcnngggccc

SEQ ID NO: 522 - DNA, 347 bp, homo sapiens
acgagctctgctttctccgcgccaatgaatgcaagaccggcttctgccatttgtacaaagtcaccgccgttttaaaatcccagggctacgattggagtgagcccttcagccccggggaaggtgagcagagcctgacgaatgctgtcgactcatcgcgttagtcacgtgtggttcaatatgctgtttgttcattggtcggcccccccactcagccagcacaccctgcgggagaaggaacagggatcggcaggaagccagccttccccagtgactgcatgatctggcagggcttagagcacccaactgttggcttattcaggcagcagatttactgagcactcccctgt

SEQ ID NO: 523 - DNA, 320 bp, homo sapiens
  misc_feature (23)..(312): n=unknown
tgaagccagtgcttaaaaaaaanaactctaatcaaatttacccccactatataatatttaccattataccaaccanacttatacaataattactcttgaaaaataagtagactgtaatatctaatcaattgcaaaatataatagattgcaaccaatttgttancaacaagaaaaaaaactcccctaaagagcttgaaccttcataataatttanagaattctgnntaacttaatatacaagaaaatctgctgtggataaggnattgcnttatgnncccnnnntctatcctcagagaanaaggcaccaatcnntaacatta

SEQ ID NO: 524 - DNA, 495 bp, homo sapiens
acatggagatgtgtacatgcgtgattgacaaagctacagagcaagagagaggataatagtggtaatgagaaggatgagctcttggatgacttctagttttctgggttccatgctaaggtggatagtgacttccatttataaattagggaatataggaagatgcacgtttgggaacaaaagatgagatgtttggtttttgaatggttgaatttgaggtacctgtggaaccatatggaaatgcctgctaggtagttggatataccagtccagagtcagagaagttgggactggagagagatttgggagtcagcagtatagtagtatatacgttgtagttgaagtgatggtttgggtcagctaagaggcatgttgagactgaagagctgcaggctgaggagaggacttagagaacactggtagttaaaggtgtgactggtggaagtggagccccagaagaaatctgaggaggcctaaagatagatggaaaactagtaa

SEQ ID NO: 525 - DNA, 401 bp, homo sapiens
tagtattgggattacgggcgtgagcactgcgcccaggctttactagttttccatctatctttaggcctcctcagatttcttctggggctccacttccaccagtcacacctttaactaccagtgttctctaagtcctctcctcagcctgcagctcttcagtctcaacatgcctcttagctgacccaaaccatcacttcaactacaacgtatatactactatactgctgactcccaaatctctctccagtcccaacttctctgactctggactggtatatccaactacctagcaggcatttccatatggttccacaggtacctcaaattcaaccattcaaaaaccaaacatctcatcttttgttcccaaaacgtgcatcttcctaaattccctaatttataaa

SEQ ID NO: 526 - DNA, 511 bp, homo sapiens
aaaaaacctctaagatattatcttccacttggagaagagcaacatgcattaaaaaaatgacagttctctggtgaagaaacaaaaaggtgataaaatatgtaacaagtacagagttagcatggtggtgagggcagtagcggggaggtaaatattccagggagaaaaccttgaaggcagatcatcaggatggcgtttcaggtggtcatgactgcttttgcagaagcagcatgttgtgcttgaggagtgggatgaaatgctgtctagatgactatggagtgggaggcagtaagctggggagggggcgggagccaaaggtagaacctgtttgccttgtctccagtttaatgataaattccaacaagcctgtacaccacattctcaacttgttaaatccttcagctgcaattatcactctctggcctccattaaatgcttattgatgagaagccttccccaatagcagaagtctccctcgcttgctccgtctcactagatattattagatgataag

SEQ ID NO: 527 - DNA, 574 bp, homo sapiens
  misc_feature (4)..(74): n=unknown
  misc_feature (490)..(553): n=unknown
tgcnatgtctgggccatatcgcaggctgaaggacacaggngtgcacattcccaggatcagtaacagggtcagtncacctgtaccatgtgtacactcaaatttgcttcaactaagtaccctcccaagccaaacccagcgaaatacagtgatagggctaaaatggaatcactccagggatccaccaggacaataaactggctctaatttgagtgcaaatctcatcagacacaaggcaagatgcatgctataaaagtgtcccatctgcccttatcatctaataatatctagtgagacggagcaagcgagggagacttctgctattggggaaggcttctcatcaataagcatttaatggaggccagagagtgataattgcagctgaaggatttaacaagttgagaatgtggtgtacaggcttgttggaatttatcattaaactggagacaaggcaaacaggttctacctttggctcccggcccctccccagctnactgcctcccactccatagtcatctagacagcatttcatcccacttcctcaagcacaacatgntgcttctgcaaaaagcagtca

SEQ ID NO: 528 - DNA, 480 bp, homo sapiens
  misc_feature (23)..(217): n=unknown
  misc_feature (467)..(467): n=unknown
agctgattagattaatttattancnacattcaattaatctaatcagctgtaaaacaggagagggcagcagattagattaattgaatgtggctaataaattatgatatggcaaactcagaattatctgtgttaattagggacagggatagcctggaaaaatgaattctgcaaatgatgcctttcctcctggatttgtttctgcagatggtcataaaanacagcatgtgaaagcaagttcatgtcttgatccctttctttgtttcccacatgctgtcttgcaggtgacaagaaataaactggaactgcagtattagagaaagaggaacatatttgtctgggctctttggtggataatgattgcagtccccaattcacactagctctttcagatggagtgtgtgaattagttgtttggtgccctttttttgtgcttttttttcccatagaaacaagattatactaaatgntagattttgcaag

SEQ ID NO: 529 - DNA, 65 bp, homo sapiens
ggccccaaccagtgcaatgacgatggcctccgtggccacgtagagctgacagagcaaacctcgag

SEQ ID NO: 530 - DNA, 536 bp, homo sapiens
atctagtctctcgactccattctcaataaacaggtttgcagaatatggctgcatcctagagatcagaaatgttcaattctttgctgatggccgctcagtggttgacagcataggcaagaggcgcttcagggtgctccatcagagccagcgggatggctacaacacagccgacattgaatacattgaagaccaaaaggtaagggtggccagtgccaagaatcccaaagccaggctatccttgtaacttgatacacaaagatagttgtgaaaggatttctcagaacccttgagggccttgggatttcacaccaaattgctgcagcaacattgaatgctgctggattgctgtccagttgcactatggcagtgagggcgcctactgtcctggctctgcttagctgctgagttgcattcatgcataggaaatgttatcctagatcaaccctggggctcattcagcttgggagttaagtctctgccaaagattgcaaggaatggatctggggtgggtctatacatatatattttatctatcg

SEQ ID NO: 531 - DNA, 338 bp, homo sapiens
  misc_feature (170)..(302): n=unknown
cttaaacacctctgctgtttatgtagttatgcagcatgtcaagaagcatcttaagacagaaagtttcaaataggtcacattcttttggtctttctactcaatttctctctgtgatcaacagcaggctgatgcctctgtttgacacccccttctgttaagatattattgcnattagatatatttacaagaagactccccccgacggcagtggggaaggtgggagctcctcttcggcaatccactcactagttttngtttcgggatatgaaggccaggactcgtcgaataccattcagtctgnncttttaaggacctcattgctaggaaggggagctgag

SEQ ID NO: 532 - DNA, 167 bp, homo sapiens
ggaaagaacacagccgtgaccaccaagaacctcctggagaccctttccaagcctgaccagatccccttgttctatgctggggggattgagatcctgactgaaatgataaatgagtgcacagaacaaactttattcagaatgcacaatggatttagtatcatcagtga

SEQ ID NO: 533 - DNA, 538 bp, homo sapiens
cacggtgtgcatctgtgtgttccccaaatgcacacaaaccctgtctctctcaagaatcactgatgtatttcatcgtagagttgagaatttctaggccatgaagctttctcagttgagcagcaaatctgggctcagctgtgcacagttccccagagcaatgcctgcgttcacctgcacggccgtcttctgtgtgtcactgcctgcaagctttaacaagacctgcaaaaggtccgtctttagcagggaagacgcaacgttgggcacctccatgcagttaccaaggcagagggcagcgttgcccaccagaacctcatcctccgagctgagcagcttcatcataacgctcaactttttatccagtcttattacttcttcccgagcttcatgataactattcgtgcagatagctagtatctttatagcataacgtgatgcagtctcacctcctgtcttcaggaatttcatcattttctttaccactcctgctcgcaagggctcctcaacaattttcagagaggaagaaaggggtccgggctca

SEQ ID NO: 534 - DNA, 469 bp, homo sapiens
  misc_feature (411)..(411): n=unknown
gggaggaccctgggcaaagacgcctaccctgccatgctgcgccatctgccctccaggctgccagtcaagatgtggggcaggactttggagaaacagtcatggagggacagcagtcagacccctcccccatgtcttatccgtagacttgaccacatcgtgatgacggtgaagagcatcaaagacaccaccatgttttattccaagatcctgggcatggaggtcatgacttttaaggaagaccggaaagcactgtgttttggagaccagaaatttaacctccacgaggtgggaaaggaatttgaacccaaagccgctcacccagttcctggctccctggacatatgtctgatcacagaggtgcctttggaggaaatgatccagcacctcaaggcttgtgatgtccctattgangaggggccagtccccagaacaggggcaaaagggctatccatgtccacctacttccgag

SEQ ID NO: 535 - DNA, 199 bp, homo sapiens
  misc_feature (20)..(24): n=unknown
tacagacatgtaggttgggnnccnaacctgtcttgggtcccccctcagcaggatgtgtgaagtgcctaagtcctcagtctttggagatctctgggcctgggtgggggtttgcaggaaggaaaggagagggcgacatcaagggggacagaatggaggaggtccagcctccatcacgaggagatgtagttggacacctcaa

SEQ ID NO: 536 - DNA, 555 bp, homo sapiens
tttttctgaacttcatcatgagaacctggttgagatcattgtagtaacacttggaaatgtgtgagattcccccttagtctggtcttcaaggagtttttaatgttctagccaggctaccctcagcttctagtaatctgtcaataccatttaagtgctcctcccacttgctgtccccagtagcttctcttccctgtgagctgtgactccttgtgtgttagcctgtgtttctcatttttaaggtggcagttttccctgtgacctcaattctctgatccaccctagaagggttgactttcagtttgttcagcttttttctagctgtgaggacaagtgatgactgcctagctctttccatgttgaaatagaaacccaaaagtttgtttaaagaattacttgttataaaagtcccccattgttaatgtacaacccaatgatgtaagttgatttatcgaattgtgcagccatcagcagagttctacttcagcatattttgtcacttcccaaattcccttgaaccggttgtagtcatttccctaatccctggtccccatgact

SEQ ID NO: 537 - DNA, 489 bp, homo sapiens
  misc_feature (74)..(74): n=unknown
ggatgactgagctaacacgtgagggaaattaagttctgactggagcagccttgcccaggctccgcctgcctggngagggggtcctgggcttggggagggctcatgtcttggagtccgcggtggccagggcacagggctggtactgaacacagtagggcttctggggctgccgactggaagcctcagggggactccgtggggaccagcgtgactcctgccaccaaccgaaacccaaactccacaaagccattgctatttttagcctcttaagtcttggttcccctgaggaggagggaggatgcccccagctgaaacacatggaggggagagaacacctcccagccccacaagctcagaggcagacagggtgacccttgcgtgctgagacaccgagacacaggcttgggtggagccgtgggccctgggggcagcccgcatgaacggctggggactgacggggtcttcccgcaggcaaactcctggattgcg

SEQ ID NO: 538 - DNA, 529 bp, homo sapiens
gctgccagtacacctccaggagggattacagttgacaacagggtacagacagaccctcagaaacccagaggagatgtgttcattccacggcaaccttcaaatgacttgtttgaaatatttgaaatagaaagaggagtcagtgcagacgatgaagcaaaggatgatccaggtgttctggtacacagttgtaattttgaccatggactttgtggatggatcagggagaaagacaatgacttgcactgggaaccaatcagggacccagcaggaatcacaaagatgattaaagggttggaaaaaaagatctatgatggaaaattaaaggaactgggattattgagcctggagaagagaagactgaggggcaaaccattgatggttttcaagtatatgaagggttggcacagagagggtggcgaccagctgttctccatatgcactaagaatagaacaagaggaaactggcttagactagagtataagggagcatttcttggcaggggccattgttagatacttcataaaaaaa

SEQ ID NO: 539 - DNA, 469 bp, homo sapiens
  misc_feature (113)..(453): n=unknown
tgagctcagcatttggtgggctcttcccctttcaatccctctccattaggaggtcaagagggaaatgcctaaattaagccttgtccaaattatttagttctaaagattttcantgcatactactagtaggatcaaaacatcttttgggaaattctatantttgttactttnccttgggtaagaacatctttaacnatcttaaatagacaaatttttatctaattttttnnnnnnnnnnnnnnnnnnnnnnnttttcacacttctttttttntgaagtattctaacaatggcccctgccaagaaatgctcccttatactctagtctaagccagtttcctcttgtnctattcttagtgcatatggagaacagctggtcgccaccctctctgtgccaacccttcatatacttgaaaacnatcaatggtttgcccctcagncttctcttctccaggntcaataatcccagttc

SEQ ID NO: 540 - DNA, 445 bp, homo sapiens
gcctttccgggagaaaaggcatccttacctctggttgaaggtctcggggcctccccctctgcatccggaccctctccccatcccagcctcccatgccaaggcccgccttgtcagtcacttccttttgtcatcggcttggcaaacgggagagaaaacagagcttcatgggaaacagcggcaacagttggtcccatacacctttccccaagttggagctaggcctggggccccagcccatggcgccccgggagctccctacctgctccatctgcctggagaggttgcgcgaccccatctcgctggactgtggccacgacttctgcatacggtgcttcagcacacaccgtctcccgggctgtgagccgccctgctgtcctgagtgccggaagatatgcaagcagaagaggggctccggagcctgggcgagaagatgaagctcctgccg

SEQ ID NO: 541 - DNA, 467 bp, homo sapiens
gggagccggcacggaagcggctgtgcgcatgagcagatgaggcctagccgaggcggcgggacccccaagtttggaaagctcttttaacggctatgcgaaagttctgtccaaaggctgctcacagcccctgtctgactggttgtcatgatgaattgagctctctgttacctgcgcatcacaaccgagctgaggcttcgaagacctcagaggacttctctcagcactcacagaaacctcctacaccctcggatggcacaaagggactgttttcttactcttagtctgagtgactgccaaggaaggcaaaggtagagcaactggatctctggctctccacatagcttctgatctcagaccttactaaaatgctttctgggcccaaggacaaagctcacatgaacaaatgattttgagtcatgaatgaaaaatcttgctctttccatagtaaagaagaattaagagatgga

SEQ ID NO: 542 - DNA, 429 bp, homo sapiens
aatttcctccttccctcaattaggccagaaactcatcatggggcatgcacagcatctacaggaggaagccccagcttgtgggggctaggatggagcagccgtgagagacacctagccaaatgtccgtttttccatcataaacaatggagcgggggtcagggggagaagagagtgggtaagtgaatggccagaaactccagagggggcctcacacccacctgtgaggtacctccttgccctacccccactgaggcctcaggccccttgcttgggtcatgctgccccctgtcggctgctgcccctgcctcttcctctgagttctaacaacacagacactggtgcctgaaagccctgctgctgccaggggagtcagaattctgggctgcctctacttgggaatctcttcccatgtggggatcttgcagaaca

SEQ ID NO: 543 - DNA, 461 bp, homo sapiens
caggaaatcaggaacacctggaagaattggctcactgggctgcatgcatccttctatgaagaaggaatggttgaagaactagggttattttgcccagggaatcaaagcttgggggtgcggtgggaaatgctgcttgtcttgaaatacagaattttgatagatcttttccacttggcctaaagctctgatggcaggtgagagatgaagggttagtaggttttgcctgtagtcaagtagtaacttttaacagtgcccctaaatggattcagttgtcacaggggatactgagttccttgacatggtaatatttgggacagtagtttagagcatgatttgttgtagggttctgcagctacaagttggcaaaatacttttcagattcattcattcagaaagttgtgaatactgtatctgttaggtgtcaggccctgagattcagagttgtaaacaagacacattgc

SEQ ID NO: 544 - DNA, 424 bp, homo sapiens
  misc_feature (105)..(123): n=unknown
agccatcactagaacccttccaacccaggaggtgacacaaaggtcctgaaatattcttcagtgtaggaattcttcctgcaggacctaggagctgccctcatccannnnnnnnnnnnnnnnnnntcctttctccttccttcctttttttccttctgactatatgcctgctttgtgctaggttccaggctaggctctgaagacatggaacttgccaatcaggacatccaggtccatggggagagagccatgtactgcaagctttggctatgtgtttgtgattccattcggaccctattgtgtgtgtactttgagtgctgccagtaccacaccactatctcccttttctctcaaactcagaactagtttcagtgcctctctttttcttgcctttcacatctaatcagtgccagattctgttaactgt

SEQ ID NO: 545 - DNA, 62 bp, homo sapiens
  misc_feature (2)..(11): n=unknown
tnaaccngggnttttgtaacttgaaagtccatcatatttccattgtgattcacttggaccaa

SEQ ID NO: 546 - DNA, 402 bp, homo sapiens
  misc_feature (239)..(239): n=unknown
  misc_feature (357)..(381): n=unknown
gcagccatggtaccttccctcagggagcagtcagtccagtggaggagtcagatatgactcaccacacagatcgaaaaatctccacaaattatgagaagaatgctgagggaagaaagaacataggtggaccgctgctgagtccaggcttacttgcagagatctatgctggccaggccctgtgctaggcagcagaggacatggaataaaatcaaataaggtcactgtgtgcaggcacctcncggtgtggtaaaggagcagccccatccacaggttctattaattccagcctgtgagaattggaaccacagggtgaattttggaggacaggcacttacactaatctgggagcataatatnttaaagggtacctacaaatcaatnaagaaaaaattggaagaaaaa

SEQ ID NO: 547 - DNA, 305 bp, homo sapiens
  misc_feature (28)..(301): n=unknown
gtttccaaacttttgccataatctatgnggntgtggtgaatttccttatacatttttcagatgtaaagcatatatatcagatgaantcctatgagtggaattcccanctcaaagcgtaaatgtatttgnatgtntgncagcgtcctgttgcncatcccaacccnagaatgnatcngtggangcttgccccaggtngtctccccnatgcctntnggnanntnatgcattatccagtgnnttnncatttgctaataccaacaggtataaaatggnntctcanagtgtntttatttttnaaatngcct

SEQ ID NO: 548 - DNA, 101 bp, homo sapiens
ttttgaggactccccagccatgctgaactaaactcggaccccaccaaatggatctgctggcacacagacctcagatatggagggaccgagaggactggatt

SEQ ID NO: 549 - DNA, 123 bp, homo sapiens
gaatccagtcctctcggtccctccatatctgaggtctgtgtgccagcagatccatttggtggggtccgagtttagttcagcatggctggggagtctcaaaatcatggccgctgcagcccgggg

SEQ ID NO: 550 - DNA, 106 bp, homo sapiens
agaggctggggagtcagtgatgttccaatctgaatttgaagacctgagaaccaggagagcttatggcataagttccagtccaaaagctggcaggcttgaaactcaa

SEQ ID NO: 551 - DNA, 383 bp, homo sapiens
  misc_feature (3)..(3): n=unknown
gcntttataatacagttttattagactgtagtcatgctcatttctttatatattgactctggctgctttcatgctgtactggaggggctgggtagttacgagtgagactgtggcttacaaagtcctttatagaaaaaatgtgctgatccctattttaaagtaaacacttgcctgagctctatcctgggcctctggggaagggacccaaacatttgtagtctgtagaatttcacaagaattgtgatatacagtattgagaatactggttatgcgtggctgtttaaagcagatggacttggggtctaagctctactctaccacttaccaccctgggcaagtttcctaacccctctgagacctggtctcctcttaataacatgaga

SEQ ID NO: 552 - DNA, 232 bp, homo sapiens
tgctcatttctttatatattgactctggctgctttcatgctgtactggaggggctgggtagttacgagtgagactgtggcttacaaagtcctttatagaaaaaatgtgctgatccctattttaaagtaaacacttgcctgagctctatcctgggcctctggggaagggacccaaacatttgtagtctgtagaatttcacaagaattgtgatatacagtattgagaatactgg

SEQ ID NO: 553 - DNA, 443 bp, homo sapiens
  misc_feature (130)..(130): n=unknown
  misc_feature (404)..(431): n=unknown
gctgcctccttccttctctcagctccaaaggcacagaatgtctgatcggagagtttagctgctttctactgttttctcacagtttcgtttatcagccttgtcttgccaatgatacagaagctccccgcangacagtgggtaggtgggagcttcccgatgatcatgttggtgttgacaaagctccccaaagtggggtattccctcaggctggtctccggagccggctctgtgctctgaaagcggcccatcctgccgtcctagagtataggtgccgtctatctctgtgtgttgagttatcgggagatgaaagatttttttcacttggtgaatcctggcattgtgggaagactctcctaacacagacataatctcttgcaatcccacaagcgcacacatacacagangcgtccacacacacacaganggcacanccctgggtgtgt

SEQ ID NO: 554 - DNA, 310 bp, homo sapiens
  misc_feature (212)..(234): n=unknown
tgtgtctaagtgacaaagctctctgggttgcagtctcttcctctgtggaggaaaggtgttctagtacatgatctccgggaccctgaagagcactaacaaaactcctgttgtccacaggtccatcaatcccacaccaagggaaccactgtcatagaaaatgtgtcttcacgctccacgttctccacgcaaaacaacgcccatgacacaccagnnnnnnnnnnnnnnnnnnnnnnnacgcctctgtgtatgtgtgcgcctgtgggattgcaagagaattatgtctgtgttaggagagtcttcccacaatgcc

SEQ ID NO: 555 - DNA, 444 bp, homo sapiens
gagaggtcttctaagaataatggccagtttgtaaaagcatcagcaagtctcaaagggcagccttggggcttaggaagtcttgaggaattggagactgtgaaaggttttcaggaaagccaagtagctgaacacgtaagtagttccaaccaagaagagccaaaagctcaaggtaaagttgaagaaatgcctatgcaaaggggaggcagccttcaggaagaaaataaagtgactcagaaatttcctagtctcagccagctttgtagggacacgtttttcaggcaggaaactgtcagcccattactaagccggacagaattctgtacagctcctcttcaccaagacctgagtaataccttgcccttgaattctccaaggtggccaagaaggtgtcttcatgtacctgttgctctaggcatctcttcacttgactgtgtgctggatctc

SEQ ID NO: 556 - DNA, 212 bp, homo sapiens
  misc_feature (25)..(77): n=unknown
actgaaacccagcaaggtgattctnanggcctttccatggncttcnngncnggtgcttgctgagatcctgtcctctntccccagaggaatgctctctggtacaccagattgactatgagatcccatggccatggatcgcacagacccacaccaggcagtgtgtgcctcagaggaacgccctctaacatttccttcggggctgtggcttctgg

SEQ ID NO: 557 - DNA, 519 bp, homo sapiens
  misc_feature (114)..(352): n=unknown
gccctagattatcgtggtggcccagcgtgatctcagggtccttagaggtgaaaaacagaggccggagtgtcagggtcagagtggtgccacgtgagcaggacttgagcagccacnnnnnnnnnnnnnnnnnnnnnnnnnnnnnnnnnnnnnnnnnnnnnnnnnnnnnnnnnnnnnnnnnnnnnnnnnnnnnnnnnnnnnnnnnnnnnnnnnnnnnnnnnnnnnnnnnnnnnnnnnnnnnnnnnnnnnnnnnnnnnnnnnnnnnnnnnnnnnnnnnnnnnnnnnnnnnnnnnnnnnnnnnnnnnnnnnnnnnnnnnnnnnnnnnnnnnnnnnnnnnnnnnnnnnnnnnnnnnnngtaaaccctgtgccttgtgttattatccccctttacagatgctgccactgaggtcacagagttagtaacccaaggcagagccagtacgtggcagggctggttttaaattgagtcaggctggctctgggctgctgattacatttcccttttcactttggccactagga

SEQ ID NO: 558 - DNA, 576 bp, homo sapiens
  misc_feature (71)..(71): n=unknown
aggcagggcagagttcattggggatgcccaagccggattcacccacccttccagctccagcctaggcgcantgcggctttcgagaggcgaaactgtcttccttgtcctggtgtcccagcagggtcactgggaggcaacagtgtggtctcagggtgctgggcgggcccgtgaggcccatcgccgtccccctaggcatcctgttcatctgtgagcagggcagggggtgccgcagcctcctcggttgtcccaaccctgctcctctcctccctctccttcctctcgtagatggagtgaagcttgttgattaagaagattttgtcctcaccctcctagaaaggccagaacacaaaggggaggagaaatcatccatcagcccatccagagccatcctgttccaaactgcatttgagggaaaactcacgaggtgtattcaacatcgcaagcagcaaaaacataaaagaaaaggtgaaagggccaccaaacaaggacaaggaaaaaccaagagccaggaagtgggcgtatgtgtggatctaagcttcctagtggccaaagtgaaaaagggaaatgtaattcagc

SEQ ID NO: 559 - DNA, 496 bp, homo sapiens
  misc_feature (323)..(393): n=unknown
ggagccagagatctcactgcacgttcctcccaggaaaaagaagaactttttgaatgccaaaaaggccatgagggccttgggcatggactagcccaagggaaagacctgcgggagcatctgaagagagaagggatgattttctcctgcccgccggtgtttgtgtgtttataatgcacaactcgcaaatataaattgcacatgcagaaggcacagaccccgtagcgcatgccaacttgcagggactcggtttaatcttgtctcatgaatttccagatggcccactctcttccatatcacaaggacataaacactccttctttcanccccacctccccagggccctggaggagacccccaccctgcaatccacaccccatcctctgctgcagaagctatggtctgtgtggtgacagccagattctctactcttatgttttgtatttgttacatattctatttttataaagggaatttaaaaaaataaatgtgttttgca

SEQ ID NO: 560 - DNA, 456 bp, homo sapiens
tatgtaacaaatacaaaacataagagtagagaatctggctgtcaccacacagaccatagcttctgcagcagaggatggggtgtggattgcagggtgggggtctcctccagggccctggggaggtggggctgaaagaaggagtgtttatgtccttgtgatatggaagagagtgggccatctggaaattcatgagacaagattaaaccgagtccctgcaagttggcatgcgctacggggtctgtgccttctgcatgtgcaatttatatttgcgagttgtgcattataaacacacaaacaccggcgggcaggagaaaatcatcccttctctcttcagatgctcccgcagtctttcccttgggctagtccatgcccaaggccctcatggcctttttggcattcaaaaagttcttctttttcctgggaggaacgtgcagtgagatctctggctccctcgag

SEQ ID NO: 561 - DNA, 499 bp, homo sapiens
gaccccttcccaatcattagggagcccaggaagagagggctgggcctcaaacaaagcctgtggtgcctcaggtgagacctcctagccctctgtcattccatctggctagagaaaagtgggtggactgcagactactcagtcaactagaaacgtcacagatatggccaggcaagcatcaaggagtttcccatcctatgttagggcacatggaatatttgcacagatacgcctaagcatatacgagatgaaaaaaatgtagaacaattatataaacataactatagctatgggtggctgcatagatgggcagatgggctggtagagaacaagaaagaagaggaatatagcacgcaaaagataaaagatcccaatatagatgaaatcacacttcatgggagagaagggaattccttacaattgtttcattcggtagaacaaatgaatgagaaacatgaattcaataaacaaagcaagatggtaataaaaagccaagtgagat

SEQ ID NO: 562 - DNA, 457 bp, homo sapiens
gtttctcattcatttgttctaccgaatgaaacaattgtaaggaattcccttctctcccatgaagtgtgatttcatctatattgggatcttttatcttttgcgtgctatattcctcttctttcttgttctctaccagcccatctgcccatctatgcagccacccatagctatagttatgtttatataattgttctacatttttttcatctcgtatatgcttaggcgtatctgtgcaaatattccatgtgccctaacataggatgggaaactccttgatgcttgcctggccatatctgtgacgtttctagttgactgagtagtctgcagtccacccacttttctctagccagatggaatgacagagggctaggaggtctcacctgaggcaccacaggctttgtttgaggcccagccctctcttcctgggctccctaatgattgggaaggggtcctcgag

SEQ ID NO: 563 - DNA, 419 bp, homo sapiens
  misc_feature (393)..(417): n=unknown
gggaacttctatcacatctacagtagataacaaatgtaggttgtttggacagacttaagagactgcaataacaagagttttttctagcttatcatgtcacatctagccttctttggggtgtggttattatagtttttgagaaatgatttgacccatggtacatctgaattcttataggagacaactatagtaactacgttttagagtgcaagttcttaatgtgttgatattttaatagttgccaaactaaactctgtatgcgtttacctatttaattgtcactggcaccccaaatcaattacctcagtgtcgcacagctttatttacaacaaaaatgggatgaggagtggattattgctccaagatactgaaggaccatgagaaggtatatcnagagagggacattatttccccacnaa

SEQ ID NO: 564 - DNA, 318 bp, homo sapiens
  misc_feature (252)..(252): n=unknown
ccggggtgtggtgcctttccttatttgtgctagaagaggaggaggaggtttcacagatgcataggaaaggcctgtctcctgtgcctttttaactgcccctgctctgggcagagctcttcagtcactcctgcccacctggcgcacgtgggaagtcctggatgggagttaatgcagtgggcttcagaactgcagttctgggtggcgggtgggtggatgggttcactgtcacgctctgtgtgcactgccccctangcaaaactcacatcagactcttgtttccttttgtaaaaaagttaggtgtgttctgagacactgaca

SEQ ID NO: 565 - DNA, 391 bp, homo sapiens
ctgataagaatactcactttatcccagagatcttcaaactcttcttgtccaaaagacccatagactgcccaaaaaaaaggaaggctgcagttgagtcaaatcatgtcagtgtctcagaaacacacctaactttttacaaaaggaaacaagagtctgatgtgagtttgcctagggggcagtgcacacagagcgtgacagtgaacccatccacccacccgccacccagaactgcagttctgaagcccactgcattaactcccatccaggacttcccacggctgcgccaggtgggcaggagtgactgaagagctctgcccagagcaggggcagttaaaaaggcacaggagacaggcctttcctatgcatctgtgaaacctcctcttctcttcta

SEQ ID NO: 566 - DNA, 528 bp, homo sapiens
gctcctgggctctgccgagggttaggtaaagaacaggactcagggagctcaacgtcagacctgtaacctcttctctctggtgataaccagaggcctcttagtcagagattccttctgattaaaggtcgcttatcactcagatgacagcccagctctgtttggtcatttcgctcagtgatttgtgctcctgctcctttctcggtgatgggtctgagccctgagctccagcagtgcattgtgggtaattttgcttccaggtacacaatgaccaaatcctcagctgtcctcttcatcttgatcttctctctgatcttcaagctggaggagctggtgaggccccagcgtctcttgtgtccttcctgcccccacagatgctaagaataaagtgggagtctgagcagtggcttgtcctgctgtgtgacagaggagacaagcccagtccaggtggcagtagatccctttctgagaagggacctagacatgggcaatactcagaatatttagaaaccagtgtggcagggtaatgac

SEQ ID NO: 567 - DNA, 480 bp, homo sapiens
  misc_feature (250)..(250): n=unknown
  misc_feature (364)..(364): n=unknown
catgcatgtagtttatattatgtgcggaataaacagaattcaatacgatattttcttacaattcttatttgacatgaataagagcttttgaaaatactagacagaaacaggtccagaatttggggatgtttagacctttgaaaatacatgaaaatgttgagatatatagttctgtatgtgtatatgaagatgtagatgcgcatatacacacatacatacgtgtatatgtgtgagtgtgtgtatatataanattaaaaggtgaatgaggtaaatatatgaaggggaaattcagccttgaacttcccttgggtcacagagatggatcctctgagctgtggggtgttagtgagtgtgtatgcgtaanatgtctgcatctgcctggtctgtctgggtcagagtatgtccatgaactttacgagcgttcagttcaataccactcagtgcagaatccgcgttcctgttttacagcccagcagccgc

SEQ ID NO: 568 - DNA, 577 bp, homo sapiens
gcaaaagcaaacagtttctgatatacatgccatactgcaaagctgtaaacccgtgttgcatggtgatgtgacaagcaccacatttctggagggatttttttttctctcctacaagctccccctccccaagccgtggctataattatttcacaaaatgcagtttgccatttctagagacaaacacttccttctccctcaccaaaacttcaagttcaggccaaatattgaatgaaattagaacttgagaggcaggctttgtttgtagcatgttgtttctgctaagagttgccccctacccaggctccaccccagtggtcggactgaagtgtacatgttatgttttaacagatgggccggctggcggctgctgggctgtaaaacaggaacgcggattctgcactgagtggtattgaactgaacgctcgtaaagttcatggacatactctgacccagacagaccaggcagatgcagacatgcttacgcatacacactcactaacaccccacagctcagaggatccatctctgtgacccaagggaagttcaaggctgaatttccccttcatatatttacctc

SEQ ID NO: 569 - DNA, 259 bp, homo sapiens
gggattaccatgtggatatctgtaagaagagtgttaataggcagatgaaacagctagtgcaaagctcctaagctggatgcatgcttggtgtgtttgagaaacagcaaagaggccattgtgactggagtagagtgagcagggggaagagtgctgggaaatgaagtcagagagagaatggtgacctgatcctgtagggttatgggtgccattgtagggactttgaaatggcaagcagaacagaggggtgacatgaagtgac

SEQ ID NO: 570 - DNA, 544 bp, homo sapiens
caattcccttcattatcttttgctgggcccaaggatattgaagccatccattgctttacttgtcttccaagttcatcagtgcctgcactgcaaactcttgtaacttcttatgctcctctaggttacactgaagcttttctagcaactcaaaatatcggaagagtgagtctctgggccaaacacggtcatcctgatccatttccattagcctgggcagattctcgtgcacaagagtttcccagtccaaatgacctatagggaggaatgcttcagaaaagcatgtctagatttgtaaaagctgggtaagagctggtaaatcctatggtgtgggtggaaaggtggagtggaaagaggtaacaggaagcaaggagggaaagggtgcatcagcaagaaaccactttttacaatgagcaaagaggccacggccacacttacccaaagcgaagaagaagtacaggggaaattaagaagcaaaaagaaagtaattaagaccagaaaattggaaaggagatatagtaggagagctcctgttaagactaagatg

SEQ ID NO: 571 - DNA, 513 bp, homo sapiens
ctcagctgctgtcttgggattgatacggagaatagtcaccagacgacggggctgagagagggatgcatttggggtggcagaatgactcctgattttatgcatttttataagctgaataagaatggaaggaaaactaaaggaagcttcaactccacgagatggttttatgggtgctttagagcctttaaaaataataagaataaaaatcagctgtctccgaatattaaaggtgtctctctggttccgaaaggtcagccaccctggcttccaaatcaaagccaacggccaggtgcccacacaggcccgtgccttgagcctcctgccaaaaggtttcttagtgtgtttttatgtctccctgacatggaagcagcagggatgtttccccagcccctaaaacctctgcacattgtgtcacccagcagagggtgatgattcaggaggagtcagaaataaagaaaggaaggagtgtgcagccctcgccatggaaagccacacagccgttcacatctgggt

SEQ ID NO: 572 - DNA, 79 bp, homo sapiens
  misc_feature (19)..(79): n=unknown
atatgagatttatcaaagnagnatcncagaagcaatccaattagcctatttgtcaaatcattgcnatngnacnnaacgn

SEQ ID NO: 573 - DNA, 288 bp, homo sapiens
  misc_feature (233)..(233): n=unknown
gccagtcatggcacagtggagtgaaggaagagcagtttcaggcacccaaaacctgacccccacgacctgttttccacctgaagagccacccattccatccaaacccttggcaaaagtctgctaacagagagaaccggccagtgtgctggccagtcgcgatcatgcctgtctttaccctctaagctgaagctgctcatcaacggtgagatggcaaaaaggtgggtccagaagangggaaaagaagggagtctgtgaaaacaaaatgctgaagaatctgcatcaaataaa

SEQ ID NO: 574 - DNA, 282 bp, homo sapiens
agattcttcagcattttgttttcacagactcccttcttttcccctcttctggacccacctttttgccatctcaccgttgatgagcagcttcagcttagagggtaaagacaggcatgatcgcgactggccagcacactggccggttctctctgttagcagacttttgccaagggtttggatggaatgggtggctcttcaggtggaaaacaggtcgtgggggtcaggttttgggtgcctgaaactgctcttccttcactccactgtgccatgactggcctcgag

SEQ ID NO: 575 - DNA, 360 bp, homo sapiens
  misc_feature (288)..(303): n=unknown
tccaaatatgcctagatttaaagctgatttaatttatggaaaaatcacccttcagactttgcttttctttttcaaatctcctaatggtagtatgatatagcatagtagaaggagatttggcctgggagtttggacaccaaagttctagctgcagctttgcttccaatgtgaccttgaacaagtcctttaacctctgggcttcagatttattgcttataaagtgaagagattggagtagtgcctgaaattgcatccagctttagaacggactcaatgaccttcttctanttgtacaaggctaanatgcctggaacagaatccttctgcattggtcttgtaccacatttttccctgggtttg

SEQ ID NO: 576 - DNA, 338 bp, homo sapiens
tacaagaacaatgcagaaggattctgttccaggcagtttagccttgtacaagtagaagaaggtcattgagtccgttctaaagctggatgcaatttcaggcactactccaatctcttcactttataagcaataaatctgaagcccagaggttaaaggacttgttcaaggtcacattggaagcaaagctgcagctagaactttggtgtccaaactcccaggccaaatctccttctactatgctatatcatactaccattaggagatttgaaaaagaaaagcaaagtctgaagggtgatttttccataaattaaatcagctttaaatctaggcatatttgg

SEQ ID NO: 577 - DNA, 359 bp, homo sapiens
  misc_feature (112)..(356): n=unknown
gggagttttctgtttgtaacaggtgggagtggaccagtttccctgttagcctgcaacaacaatcccaatggttgaaagacccccaaaccagcagggagagtggttctgtttngaccaaaaagaaatagaaatatatacttgngtcagcaatgcaagaccccctgtngttgccaggaatcagnatgcatattatttctaacataagtttttctcagatgntttgcactttgttgtccagtgtctttttaaaaatgntanactataatttgcatatcttgggcaagtttgtagatacaagaagtgttttgggtataanctgtggaccatgaaaaatgcaagtgcaatcttnatctganttg

SEQ ID NO: 578 - DNA, 267 bp, homo sapiens
  misc_feature (162)..(249): n=unknown
aggttttactgtgaaaagcatgctcatcatacatcagcgaactcataccggagagaagccctacacatgcagtgaatgtgggaaaggcttccccttgaagagtcggctgattgtacatcagcgaactcatactgggagagaaaccttacaggtgcagtgaantgtgggaaaagtttcattgtgaatagcggactgatgttacatcagcggaactcatactgggagaggaaaccgtacanntgnaatgantgtggaaaaagttttgcc

SEQ ID NO: 579 - DNA, 483 bp, homo sapiens
  misc_feature (162)..(483): n=unknown
aaatgaaaggttacccccaatccacagactctctctcagatgagtaattttctatacattggtacatcaaagaattcagagcctgaattcatgttgaagcctttctgacattgatagcattcatcctagtgaataacactggattttgaaatatgatttttnatactcagtanacatgtagaaaatctatactgtgaaatctctgatgttgtacaaggnagattttcttcccaaaggcatgaacatgtccantgcattgtcagggtttgtttccattatgagttcgctgatgtacaatgagatttcnctttgaggagaaggcttttctacattcactgcatacaaagggtttctctcctgtatgagttcgntgatgaacaattagacggntcttcatagtgaagcctttacnncattcattanatccataaggnnnttctccagtatgancttgnntatgtaaagcaagctctggtccttggn

SEQ ID NO: 580 - DNA, 300 bp, homo sapiens
  misc_feature (145)..(263): n=unknown
agccgccaccaagccaggtgtctggggtctcagtgtcctggatgactccatctgcaagaccaaggcgagtttctccagggccacgaggcagcgcctggctccggcagctgggcacgtccagggcagaggctgtgcttctggattngggcgtcctcaccatgccccatcccaggcgtctcccccaggccttccttctggagagacaccttattcgtncctgtctcttaaagcctcaagtttgattgaagaagcagaaagttggnatagacacctttgagcattcaagctctcgccgggcct

SEQ ID NO: 581 - DNA, 245 bp, homo sapiens
  misc_feature (73)..(232): n=unknown
aaacctcagccccaaacactaaagtggcaacagattggtagggagtcctggtgcatggaagaagcaacagtanacctttgggggaaatacttttgaacacagacccctcaggattcctacagattaagtttagacagataagaacttaatcaaaaattaccaaacacatgngaaaataaaccanttgactgacaggaaganggttttnatgtggttagtngggagaataganaaggctgctgctt

SEQ ID NO: 582 - DNA, 564 bp, homo sapiens
  misc_feature (411)..(491): n=unknown
ttagggaatcttcgccacactaaaaatttaatacagctaaatttgactattttttttcaacttttgcgatttcagtttttataaagatggtctccttcatccatagattgtcagtgtaatctcttagatttcctccaaatatttccatgactttaatttttacccctaaatttttaatcctgactcatttgaatttactcctgaatatgatgtaagagaagagtccaatttaagttccagactaatggccagttgtatgaataccattagtaactaatgaatttaaatactcctattatcacccccaaaatatgcaaatatcatatatgcaaatatcataatttactagtagagtatgttgcattgatctacttatttattacatgctcaactcattttaatttgattatngtggctttataacatgtttggtaagatatattttataattttctttgtnatttgttattttcagacatttcttttntttntaaatagtagaagcagcagccttctctattctccccactaaccacatcaaaaccctcttcctgtcagtcaagt

SEQ ID NO: 583 - DNA, 353 bp, homo sapiens
  misc_feature (274)..(341): n=unknown
gaaattagtaagggagggccgagaagacacggctgctcagaagctgttcgctgtttgagggatttcccggagagcctgttaaaagatgcgaagtggtgggtgtaccgctcagccacctttaaaccggctctgtgcgttctggctctggaaagcaagtctccaggcatttgggctcagaattgctgggccccgagtttgggcgggggtggtccttctgggggtcaggccttgagcagcttgcactggtggcaggtttgggagcagttgaggggcntnctgntgtgncnttttgagggggnnacccnngaagttgcannncngaagggagcntntttgccccngagttttgaaag

SEQ ID NO: 584 - DNA, 537 bp, homo sapiens
  misc_feature (333)..(333): n=unknown
ccagcaatccacttgctttgagacaagaccgcccttggcagatcaattcctcatggtatttttcaccttgcagctgagagcccgaggcgatctgagagcccctgccacagcccgggaccaccctggccctaaaacctccctagggccaccaccctgaccctggcagctcagacagatcctattccaaccccgcagccatatcctccctcgcagacccaggtcccctgagaagaggttaaatcaatcaagatgccactgcactgccactctttggagctactggaagggtgaccagtttgcataaatggactccagtttgcataatggaggtcnttctaaacgcatcttcttcctctgccccaagttcccagcttccctactcctcagccccagactgactgagggccaaggccccggagcagctgtcctgacgaattccaaggatatgagtccaccggctccaggtctacccctaccccaggcattgcacgaatggaggagggagggactaagccactgctcccttccctttccgag

SEQ ID NO: 585 - DNA, 432 bp, homo sapiens
  misc_feature (310)..(310): n=unknown
  misc_feature (427)..(427): n=unknown
taaacttaaggctaatgtttagaagcttttgctaatgagaggaccatttgctaaatcggtataagtgctacacatttgggtatctccatcccaacatacctcttattgccattccccaaagcagacaccgtctcctccctccctcaaggacctctgagcttgcactccaattcctctcccacactcacctttctcctttctgttcctcttgggatccaggtttatttgaggagataggaaaagctcctgatccagcaggttttattcttaaatttgtaacaaagtaaatcacagaacctccacccagcancaggcctctggttctctccctccttcccaggtataggccggctttcagaaaccctgcaccacatagaccctgggcctgaattgctgtgagtataatgactctgctcgtaatttgtgncttct

SEQ ID NO: 586 - DNA, 397 bp, homo sapiens
  misc_feature (304)..(304): n=unknown
taaatcccgacctggtttctcgtgagcttgaagccagggtgcccacactctgcaaaagaagaaaaatgccagtatgagtccttgaggctcagtgttgttgtgcagtccgtggacaggacaatgtcctcatttcaaggtttcatttttggaggaaaaaaaattcctcaggatgcaggatgccctgcatcccataatgggtatgcccccattgaaaccagctctgggagggtgaccaaactaaaaaggaaacagttccaagcagaaggacacaaattacgagcagagtcattattactcacagcanttcaggcccagggtctatgtggtgcagggtttctgaaagccggcctatacctgggaaggagggagagaaccagaggcctggatgctgggtgga

SEQ ID NO: 587 - DNA, 375 bp, homo sapiens
  misc_feature (213)..(234): n=unknown
ccctgccttgaggaaggggcaataccaccagcgtgtcttttatcagggaagatattgctgcagtttggccgctgcaacttaagagaaaagctgaggggtcccccagcatcccttggggtgccactgcaaatactggctgggcctggagatgacctgggtcccattcacttcctagggtgaaggaggtcatcattaccacccctgctttcagcnnnnnnnnnnnnnnnnnnnnnnacaaactggctgagctgcaaccctgagccggggaattcagccactccagacacagcccctgccctccgggaagtctcgggagacctggctagtctggctgggagaagtcacacgttgattgtcttggaaagtgagatggca

SEQ ID NO: 588 - DNA, 554 bp, homo sapiens
  misc_feature (134)..(134): n=unknown
  misc_feature (331)..(424): n=unknown
  misc_feature (540)..(540): n=unknown
aattcaaactgaactgggtgtcctgtatttaattctcgcagtcctgggcacacacgaagcctcctatgagtgctggcagtccagcctatgctccttccaaagcaattctcctttcctactgccccgtcagggcnctgtctgtgctggaatcatcattgtcctcaactgcaaaatggaaaataaaatgatagtggttcctccctcccggggttgccaagatgattaaataacataacaactaagatgtatccggccccttctcctctacttgcaaggcatcgatcccttcattcctcgcaatcacaccacgtgaaggtgccatgaagccacnnnnnnnnnnnnnnnnnnnnnnnnnnnnnnnnnnnnnnnnnnnnnnnnnnnnnnnnnnnnnnnnnntgtcccactcatctttgggtgacctcangttcggaccctgaggtctgaacactgcattaagctctccagacagaatcaacttcggaactagcgccagagaccactaagtcaatcccaggtgacaccatcagcactcaataaatngtagccactgccgg

SEQ ID NO: 589 - DNA, 308 bp, homo sapiens
cagaaacagacagaagtggacagattgaagacatcttagaaaattgagtggacaagacttaatgattgacaggatgtggaagaagtgggaggtgtcaagggtggctgtcagtttctagcatgagtaactgggtagatgacagaaccattccacactggatttctattgtgtgattcccctgttacattactactgctgctttcccgctctctccatggtctatttttgcctagaacctttcattttttttccacttatttctttattttttaatttcccatcttcaattgcccctgataagtctctac

SEQ ID NO: 590 - DNA, 463 bp, homo sapiens
  misc_feature (23)..(23): n=unknown
  misc_feature (241)..(247): n=unknown
  misc_feature (414)..(442): n=unknown
tcctatacattaaatatcaaganatattcataattgattacaagtcaagatgtaatactgagggaaccatagaatcaaaatacccactcatgatacagtagtgataattccattccaataatggacacagtaacgacttgttcacaagacacaacaaaacccatcaaaaaggccatcactttaaccaacctataataccacaatagaaaatgattctgaatcataatatgagcagccccantaatcncatctttgtcttatcaatttatcaggtcattttgagactgtagagttacactgtcatagacttttaagattccatttccttagttttatttcaaattattattaatgaatggggacaagtcatacgagctaaaaatacttttaaactgagttcgtttttcataaganaaaaagggtcnnattttagtacganganagcatttcccaagcaatgagt

SEQ ID NO: 591 - DNA, 408 bp, homo sapiens
  misc_feature (307)..(399): n=unknown
gaatgtataaattctggaaacattatgtgttgttcattgcagaagctctgaatcagggagagactgtggatctggatgccttgatggctgatctttgctctatagagcaggagctcagcagcattggttcaggaaacagtaagcgtcaaatcacagaaacgaaagctactcagaaattgcctgttagccgacatacattgaaacatggcaccttgaaaggattatcttcttcatctaataggatagctaaaccttcccatgccagctactccttggacgacgtcactgcacagttagaacaggcctntttgagtatggatgaggctgcncagcaanngtgtacntagaagactcgnaaacccnttagnnacnnaantagcacagaagaaccgcggntancagggcaca

SEQ ID NO: 592 - DNA, 560 bp, homo sapiens
atgactcatattacaataaaaaatgccattcaagaacttccaaatactatagtcacgagaataaaaaagaaactaaatttcttctaaatcatctttgtgccactaccatatctgataatatattccttctgtactcttgaaacctatctcagaagtatctttgacaaattataaatgtagaagaatttaagaagttaattaaaattattttaatataatttctcctttattttaataacaaaataccagggaaaaagttccatttatttacctcagtaattggctgcccttgatgtgtcaaatccagctcttgagggcgtgttactttatcaatatccaaagagtccatgctggaggctgcggaagtgatgctggaatgggaggaattactaatagagtgtacttcagcatcactcactgtgcctgctgacgcggttcttctgtgctgattagttactaagggtttagtatcttctagtacagattgctgagcagcctcatccatactcaaagaggcctgttctaactgtgcagtgacgtcgtccaaggagtagctggca

SEQ ID NO: 593 - DNA, 311 bp, homo sapiens
  misc_feature (60)..(60): n=unknown
  misc_feature (293)..(304): n=unknown
gctggtgccaatgaccatgccctggggtcagctgggcaaggatggctggctgggaggcanacattgcgtggcctgccttgcaccccctgcaggctccgtgctctatcacctctttatgtgccaccaagggggcagcgctgtgtacgcccggctcctcgccctggacatgtgtggggtctgccttgtcaacacccttggggccctgcccatcatccactgcaccctggcctgcaggccctggctgcgcccggctgccctggtgggctacactgtgttgtcgggtgtggccggcnggcgtgcgngnaccgccc

SEQ ID NO: 594 - DNA, 396 bp, homo sapiens
  misc_feature (59)..(373): n=unknown
tgtgttctgaaaaggacagagggggccttggagtgcagccagatggaaggactttgaangntgtccaagtgctgctttcagagtgcaccaagtttttattgtccctgactgtngctccctgnctgtttgtcaggcggganctggnagcctgcacagggacagagctggtttcatccggcactccctagccctggacaccctcnttgtctcgcctgccctcctgcaggncttcactctcccctgaggctgtnctggccccgactcnccngagcacctncancccccggagcaggtgcacacccaggtaagcaggtccaggggcttgggtnggcagggctagcttttggatcctgantntcactactctntcctnccacggatgccctgggacctaag

SEQ ID NO: 595 - DNA, 443 bp, homo sapiens
  misc_feature (267)..(267): n=unknown
  misc_feature (378)..(440): n=unknown
ctggagctgaggaatccacccagggactggtgttgaactggggcctgatgaccaccgggggacaaggtatccacaccaggcttgatgtccacctgtcaccagatgtctacctcctgcttcaggtgcagaaatacagcgatttccagtgccagctgttgagccagtgccagcaccaggggcagattcccctccagggacagcgctggagctagaggaagctccagagccctcctgccgctgccctgggactgcccaggaccagcccantgaggagctgcctgacttcatggcacctcctgtagagccaccggccttcagccctggagctgaaagtgtggctggagctagaggtggcagagaggggttgccagcacagcnncagccagcagcntccacactgcanccagtcctgggcacagtggaagctattgaggcagagacca

SEQ ID NO: 596 - DNA, 503 bp, homo sapiens
tgaaattcttaggtaagctatgaataaatccttgggcaggtgcaggcatacagattctggggtgcagctgctgagtttaaaagcttcctttggagatgccccctggccccctcaccccctgtccgcctgtcaagaagaggccatcctgggcagcacattaggggcaaatggcccagatgcccagctgagggcaaacctccatgcctggaggaggaggtcgcctctgggagcaggaggacctgctggaacccctgctcacaggctccttttcttgctctccagcacctcctgcaggcaggcaaacagccccagcagcagtagcagcaggcccttcagcagcagggctgtgctctgctgaatgggagaagtccctctccagtgaggcagaggagcccagattgcaaaccctggtctctgcctccatagttccactgtgcccaggactgggagcagtgtgggagtgctggctggagtgtgctggccaaccctctctgccaactcta

SEQ ID NO: 597 - DNA, 440 bp, homo sapiens
  misc_feature (440)..(440): n=unknown
aaagtggtggtgattccttatgtgtcctccagagagaacatagacctttcaaagattccaaacagtgtgtttctggatgactttcttgccaccggcaccagtgagcaggccccgcagctggagttcgagcagctgcccttcagccacccactgttcatcatgttctcatcgggcaccacgggcgcacccaagtgcatggtgcattccgctgggggcaccctcatccagcatctgaaggagcacctgctgcacggcaacatgaccagcagtgacatcctcctgtgctacaccacggtcggctggatgatgtggaactggatggtgtcccttctggccacaggagcggccatggtcttgtacgatggtcccccctggtgccacgcccaatgtgctctgggactggttgacaggataggcatcactgtcctggtaactggggn

SEQ ID NO: 598 - DNA, 160 bp, homo sapiens
tcatagcactttcccccatatttttataatccaaaaggaaaatgattcaagaaaggatttcattgtgctcagtttcaaaaaatataaaaatggacatcagattagagatacaagttcatacgctgaactgaattgtacataccaactgcctggctatgga

SEQ ID NO: 599 - DNA, 349 bp, homo sapiens
attgttgctggcttatgaagatatgatgaaagagaaggacgagctcaatgccaccctcaaggaggaaatgagaatgtttaggatgcgagtccaagaagtggtgaaagaaaatgaagaattgcaccaagagttaaataagagtagtgctgttaccagtgaggaatggcgtcacttcagactcaagcaaaactggttttagaggaaaacaagttgttgctggagcagttggagattcagcaaaggaaagccaaggacagccaccaggagcgcctccaagaagtttctaagctgactaaacaactaatgctcctggaggcaaaaacccacggccaggaaaaggactggcgga

SEQ ID NO: 600 - DNA, 408 bp, homo sapiens
  misc_feature (15)..(15): n=unknown
  misc_feature (224)..(327): n=unknown
tccactgcgattttnccatccgagtgtgttttgagttcttggcatttggcacgtaaaatctccagctgttccctgttctccgccagctccttttcctggccgtgggtttttgcctccaggagcattagttgtttagtcagcttagaaacttcttggaggcgctcctggtggctgtccttggctttcctttgctgaatctccaactgctccagcaacaacttgtnttcctctaaaancanttttncttgagtctnaanctgangcnaatcntcactggtaacagcagacccctaatttaactcttcgtgcaactctccatttcttcnnctactttcttggactcgcatctaaacattctcatttcctccttgagggtggcattgagctcgtccttctctttcatcatat

SEQ ID NO: 601 - DNA, 290 bp, homo sapiens
gcagacggctcttgggctcttttccccacctgtctctaacacaggccccacggtgatggccacaggcagtagaggaggaatgaggatgggttggggagcggggagtcgcggcttggctcttcctggtttctgagagggacatcttcatccctactccccttggtccccaaccacagtcctggtgaagatgtggatgataatggtgccttgatttccaaatgaagacagctttattgcttaactctattgtacataggatacacgttcagtgtaaaataaagtgtaaaggg

SEQ ID NO: 602 - DNA, 375 bp, homo sapiens
  misc_feature (374)..(374): n=unknown
gcagaaataaaggatcagaaggctataaacccaagtatcattagcatttatatctaggtgcagcattaagcctgaattcccctttacactttattttacactgaacgtgtatcctatgtacaatagagttaagcaataaagctgtcttcatttggaaatcaaggcaccattatcatccacatcttcaccaggactgtggttggggaccaaggggagtagggatgaagatgtccctctcagaaaccaggaagagccaagccgcgactccccgctccccaacccatcctcattcctcctctactgcctgtggccatcaccgtggggcctgtgttagagacaggtggggaaaagagcccaagagccgtctgcctcgng

SEQ ID NO: 603 - DNA, 179 bp, homo sapiens
ggaaaacacatcagtcaacccacattctgttcgcaggagagctccagaaggggtgtggaaggttgtgttgggtggagaaaccagatagtgaggatgcaactaagttgctgagacaagggaagagagatgagggtgagagttctccttagataagatttcaatatgttaatcatgtgtag

SEQ ID NO: 604 - DNA, 136 bp, homo sapiens
ctctcaccctcatctctcttcccttgtctcagcaacttagttgcatcctcactatctggtttctccacccaacacaaccttccacaccccttctggagctctcctgcgaacagaatgtgggttgactgatgtgttt

SEQ ID NO: 605 - DNA, 506 bp, homo sapiens
tgaaacttaaactattgaaaatcatcgagtaaactcaaaatagcagaattctctcttttttgtgattatgcatttttacctaggaaatgcttatagctgggcaaaaagtgttttcagaaggcaatagaggcacggtggagaatgtaatttttaaaactttaccatgtttttttagagagcatattcaccttgttcctgctgttccatcagtgcaaatgagcactatatttttcttgaccttgagtttggcctaagggagcaaaaatcagtattaaaccataatacagggagaaggccagatgagggcatcttatttttttttcctctccctgctttatgttaggaccttgatctaaaataagcaaacgaggcctgtgtttattttgaagctctccagagaggcctacaactttaccacgttcttaatttaagtgaccttactatcagaaacattcatattactactatttaacagtacttagtttaaaaattaaataattactaga

SEQ ID NO: 606 - DNA, 392 bp, homo sapiens
  misc_feature (17)..(17): n=unknown
  misc_feature (333)..(334): n=unknown
caaaaggtagagccctntatcaacccagaaacacctagatcagaacaggaatccacattgccagtgacatgagactgaacagccaaatggaggctatgtggagttggcattgcatttaccggcagtgcgggaggaatttctgagtggccatcccaaggtctaggtggaggtggggcatggtatttgagacattccaaaacgaaggcctctgaaggacccttcagaggtggctctggaatgacatgtgtcaagctgcttggacctcgtgctttaagtgcctacattatctaactgtgctcaagaggttctcgactggaggaccacactcaagcnnacttatgcccaccatcccacctctggataattttgcataaaaattgggattagcctgg

SEQ ID NO: 607 - DNA, 542 bp, homo sapiens
aattatataaatatactaaaatacaataaatattgttttttgttttacatggtgaataatatctttaccatagagagaacaaggccacagacatttacttacattttcaatgggaatcgccataaaaaagcaacaggcctgctgccatgcatgaaacacttctgccacaaagagaccacagcaagactttaaaaaacaaaacaaaacagaacaagaacgaacacaacagagagagattttaacaaaataaatcttaggtcaacataaaccatcaagcatgtgactgtgatgtatcttattgggtaaaagagccactgaccacacaattgctggatgtgtctcctatgaaaccacttaacagatctggcccttgcaatcctttaagtttgtgatggggggttgtttgttttaaatttgtccctcaaaaggaagctgcataaagttgacatatagcagatattccaagcattccttacatattaaaaataattacaaagataatattttcaaacaacacaaaaccaatctacactacgtaaagt

SEQ ID NO: 608 - DNA, 306 bp, homo sapiens
  misc_feature (10)..(11): n=unknown
  misc_feature (124)..(234): n=unknown
tttctaagcnnccctggaactggactctggccacagagatcatttaggagacatgagtccttaccattgccaattgcctgttctgtagacaatcctaattgttgaatgcagatcaattaactantgatatgtgatagtaaacatctgtccaaacttaggagaatataagangccagtaaaagaggtgggntccaattaattaaaaacaagttgtgtaatgttaaaagttttaanactttgataatagtctgtgcaatgtaaaatagctattaagctttcagtctgatcaaatgaacacttgtctac

SEQ ID NO: 609 - DNA, 501 bp, homo sapiens
aatgtcatcttttttcttggtttctctttcagcacaggatctaatctagatattggaaaagagaatccaatgggttatatgtttatcttccaccttccccactttacgtatcacataagaatatttgagatgatttcttatgcagaagaaaaaattaactgagcaactatattcagaaaaagacaggttctggctatgtgtttttaattcatatatataatctatatgagtaagtgctatcatatgcttcctccgcagcccttgtgtcagaaacactacagaaaaaattatttcagaaacattttacacatcagatcctgctaggcaataaagaaatcattcatttaattttgtcctccaagtgaatacactaggatcaaattatccctagtagacaagtgttcatttgatcagactgaaagcttaatagctattttacattgcacagactattatcaaagtattaaaacttttaacattacacaacttgtttttaattaa

SEQ ID NO: 610 - DNA, 429 bp, homo sapiens
  misc_feature (325)..(426): n=unknown
ccaaaatgtatcttatacaaacattgtagaaatgaataatgattactcaaataagatcttttaattataagcttctggcatctctatttttcccttaagtaggggatactaaagtgaatgattttctaagaggatcttttgaaactctttagtacaatatttgagtaaaataaattattgtggatcttttgaaactctgtgtagtattcgagtaaaataaatatttgacatttacagtagggtacaccctaagttgtttatgaattccttataccactgttatatttaatttttcagataaaatatgtatgggaaaatgactagngaaattgattcttttttaaggctcagggacaagattaagtggactaattgtggaaccccaagctcctaattgtaaggtccagaggtggatggnctcccatnaaa

SEQ ID NO: 611 - DNA, 407 bp, homo sapiens
tacaaagttctaaaatttaaagaggtatatacaagtatagacatcaaactttctaaactgaactaattcgctttcattggttggtcaaaaatatgcaaaaaccctaaatattcacacatttaatctctgagatttctgactaaataaggagctaccctgaaagtacatgacatttgtaattttatggagacatcactctgaacatacaattagagcttggggttcacaattagtcacttatcttgtccctgagcctaaaaaagaatcaatttctctagtcattttcccatacatattttatctgaaaaattaaatataacagtggtataaggaattcataaacaacttagggtgtaccctactgtaaatgtcaaatatttattttactcgaatactacacagagttc

SEQ ID NO: 612 - DNA, 279 bp, homo sapiens
  misc_feature (7)..(10): n=unknown
agcgcangangttcgggaagcagtgcaatttctcggaccgccaggccgagctgaacatcgacatcatgcccaaccctgagctggccgagcagttcgtggagcggaacccagtggacacgggcatccagtgctcgatcagcatgtcggaacacgaggccaactcagagcggtttgagatggagacccggggagttaaccatgtcgaggggggctggcccaaggacgtgaaccccctggagctggagcagaccatccgtttccggaagaaagtggagaaag

SEQ ID NO: 613 - DNA, 575 bp, homo sapiens
  misc_feature (221)..(224): n=unknown
  misc_feature (422)..(486): n=unknown
aacagaaagcattcaggtgcagcagaacagccaagctcgtcccgcccgtcccctcccacatacttggaggctcctgtcgtggcaatgtgtccaaatggtcagggagctgcctggaaaggtattttcaaagtggacagactttctgttcctgatttgtaggtggacgaggagggtcgatcatggaggagaaacccttccccactcctgaaggtcttcccganntnctgccatggccatgcaagtctggttgagggtcaagaggtgggaaaggaaggcacacagggatagcgccgcagtcgaaggctgacttctaggctaagtcttcttccacttcttcatccgccttcttcccccgctgcttcctctccctcctccaccacctggtcttcttctggacttggttgctgaggcactggcgtcantttatggcgtctgcctccttcttcttcagtctgtgaagatgatgtcgaagaactcctcctcggncttgctgaccagcgcctccaggtctacggccagtcctcatcggtctgctcctcatccctgccctccgcttaaccttctccttcagccga

SEQ ID NO: 614 - DNA, 229 bp, homo sapiens
  misc_feature (3)..(194): n=unknown
gtngttntaagatggagnnnnatacctttgacatacttaacatgctgantattanatnnagtccanggaatatcattagcnttnataatgcnnaaagcagtctcctacngagtgnccactatatnccaaagcctgggggtnctaaaaaggangatgtattgcttgctctcaccaagcttatcaataataactgnaataattgagtacttactatgtgccaggcatttat

SEQ ID NO: 615 - DNA, 354 bp, homo sapiens
  misc_feature (325)..(341): n=unknown
tatcggtaggattctattggtacccacaatgattgtctctgaaaatgtcttgagtttatatcaactgtgccattttttttttctgttttaaagtaaatttgagacattatgtcatttcataactccatatgcatttaaaaagtaaggacattttcttatacaactatatgccatcatcatctctaacaaaatcattaacaaattattgataccatctaacagccagtctatgttcaaatttccctggtaaatttggcttcttaaccttatcatcacataaaaaggggtctcctgtttttaaaaaagctataagtattttttaacncnaccagaggcttnangcagaattttttt

SEQ ID NO: 616 - DNA, 540 bp, homo sapiens
  misc_feature (489)..(533): n=unknown
ttttaaaagttgtgatcaaaaccaaaaggttaacatccagaaagtaagaaaacatgatctgttctgctttctttacattttcaactgaacctgtgtttttgtttggtttgtatttttaatgaaagagatggggatggagtctgccctgagatcctccaattttgcctctggtcgcttctctgcctcatctctgctcccttcccctgccagctcagtgccacctttacctggtacacagctccttcctccagaccctgaagtagtcttcagcctccctacccagaagatggccgtggaaaacacacaggaagggccatttcacattgcaaatgccctcatgaatccagcaggctggtagcttaacgtatacagttattaggccgaaggaggatgcaggtgggaagctgaggagggttgaatgagtcccctaaggatacgtaaattagaagcagaaacacagtagaattcagacccaagattaataatctntgctcctgcataaagggaactctcttgccaaatttacaggtagnaaaaaaa

SEQ ID NO: 617 - DNA, 417 bp, homo sapiens
  misc_feature (46)..(46): n=unknown
gagcagactaaccaagataaagattaacaagagggccagggtcctntgggtcaccccttggctgggtacccaaagacttttacacaagagagggtaaatggtctaggggtggagaagaaaagttcctgaaactaaaacagaaaaatgtaggggtcgataggactatgaaagttggtatatttgaacacttcatgtgaagtagttgcattttttatctgattttatcatgggaatgaacattgtatctgtgtgggggactgttttccctacctggtactgtaaaagagaaggcatgtaaatcgtcccttcaagcaatattatttggacatgctaagctggaaccagggagactgcccaggcccacacagtgcagagtagaagctacggtgctggtaggacaaatctccacttgataac

SEQ ID NO: 618 - DNA, 575 bp, homo sapiens
  misc_feature (475)..(566): n=unknown
tttttttatggcactctgaacactttcatcttccattggataagcaaagcctgcactagagtcagtgtctattcctatcaagaattcctattccatttgtagtcccccagggctgccagcatcagtctcacttgccagctatgttcagggccttcccaccaggaaatctttcccatagccagtttctgtctctcttactgagaaacagaacagttcttcctagcattttgtgccttggaattgccatccataaaccaagaagctcttgtttggtcagttgaaagttgtttatttggcactgtagaatccagcagtttctcacacagttccagagtcagtcctaggggaaaagaaattctctgcatgccttgagtagcatgatcctctataaaccatttccattgtgtcatggaactcttctgggcactgccatccccattagaatgttcctctgacatcatctgagacagcatgnntatttcaggtatcagtggggtggcttcagtaaatgtttcattgcgagtcagtaaatgccctttcangtggaaatttctctaagtccaaangtcccagtg

SEQ ID NO: 619 - DNA, 456 bp, homo sapiens
  misc_feature (271)..(271): n=unknown
gttgaagaaaaaaaagaatagtccgttctcatatgacagtatgtatgataacagtaatgacaatatcttgtgttgtgaaagggcttttcaaaatagaaaagcacttctatagacttcctcttacctattgtcacaaaataggcaaggcaattgtttattatgaacctcagaaagctggaatttggagaaagtcagtgactgaaggtaagacagtagtgtgtggtggagttcggaattgcaattggctgtccatggcttttctagcctttcnaggctgccctgttgtgcctacctttggtctaagctcaagtgtcattctttacatctccttctgttttctgtttatgcatgtcacaaacatataactatgtgataagattttgatcgctccagacagcttcacttctcacacagcaagagcattgctataccgatcctcttggctgactccccatc

SEQ ID NO: 620 - DNA, 409 bp, homo sapiens
  misc_feature (314)..(314): n=unknown
aaacagagtggaaattagagacttaaaaatgatcaaaatacagaaatatgaaattatttttcctgaggttcagactggttaaaggaagattggaagtttccattgtatttggtaaaggcatgtgaattctaatcaggtcacagggcatcaagaggggtctttaactctttgggaacataaagtacactttttaaataaaattataacttttcctggggtgactttgtcatgggtaaatttgggccaaggttaatggttttagaggttgaattacttatgtttgttttatgtaaagtaatatattagggcaaganatttgaatgaacaaaataaacaaaagatatggtctctatcttcaaagcttgcattttagttagaaaacaaaatctgcataatgaaattatataaa

SEQ ID NO: 621 - DNA, 503 bp, homo sapiens
cagttattctttcttgatgaattctatttacctatcatcattttcaagttgtacttattatgtgatttgatcactcgtttatataatttcattatgcagattttgttttctaactaaaatgcaagctttgaagatagagaccatatcttttgtttattttgttcattcaaatctcttgccctaatatattactttacataaaacaaacataagtaattcaacctctaaaaccattaaccttggcccaaatttacccatgacaaagtcaccccaggaaaagttataattttatttaaaaagtgtactttatgttcccaaagagttaaagacccctcttgatgccctgtgacctgattagaattcacatgcctttaccaaatacaatggaaacttccaatcttcctttaaccagtctgaacctcaggaaaaataatttcatatttctgtattttgatcatttttaagtctctaatttccactctgtttaaaaaaaaatactcgag

SEQ ID NO: 622 - DNA, 242 bp, homo sapiens
  misc_feature (10)..(76): n=unknown
  misc_feature (184)..(218): n=unknown
tatacattgnttgctgattgtttgctactccggatccctcccctagagtggaaagttcaatgtgggcantgattgngttctattaagtcgccaagtctccagtacctaacaccatggcatggcttccaggtggcactcaacaaatgtaggttgaatgatgacccggtttgagagtacccaggtnaagaagtttgggtttnatnttacaggtaattggnaccactggaaaagttttgatcagg

SEQ ID NO: 623 - DNA, 399 bp, homo sapiens
  misc_feature (255)..(255): n=unknown
ggtgtcttcagacaagggtcatgcctgctacaactcccacatttcatggctacaatttcccttctgtgacctatatccttggatgctctgacttaattctaaaatagccagttgacacagcccttcaatctggcaaacctaccattgcttaatagaaattaataggccaattttgattcaagaaatactatgtaaagaccagtattttcagttaactttgaaagaaaattttactatatttgaaaaatataagcnaagcatatttccaaagacaaaggttctggtgggttggaaagggaagaaacaatttgcaaaatcacactctagtatatgaaaagactgcagattttagtctactaaaatcctcaatatatttagcaaatccccaatacagttttg

SEQ ID NO: 624 - DNA, 374 bp, homo sapiens
  misc_feature (363)..(363): n=unknown
gagaatggagataaacgcatgctttaatctgtcatgtttaactagaattcttttctcagctgcaaaagttctcagctccttttccagtgatatcagaaccaaacttaattagtccatgcaaattttgaggaggggaagactttgagcagttgcttagctctgggatctgtcctggtaaaagccaccaagcctgccatgtttgggtttgctgacgatattgggtcagccatattgttacagctgcttttctgacccgtgttaatctgtcctcttgtagaagtggggcagcgtgagcaatccactcttcctcccgctgatcccaccacagtcttaagggttcaacgccatagtcctcacctacgnacgagtagaga

SEQ ID NO: 625 - DNA, 381 bp, homo sapiens
ctaatgccttttaaactgagttttcatgtaaacaaatcagctgagatggctgagggaagctgagatctgttttcctaaggctgatagcctttgatcctgttgattcctaagccctcaaacacttgtggctacagagtatgccagggcttggagttaaatgggccaccctagaacaagaatgagatgactgagaaaaatggaggcatgctgtctcagaaatggtattgctattgacaaagcaggaaaatttatttaaaacaaaggatgtgaataatttggccatccaaaattgatccagctgagagaggcactaaggcttcttaccttctggagggtttttattctaattattccagacgacaagtagtttggatagactgg

SEQ ID NO: 626 - DNA, 256 bp, homo sapiens
agcttcgcatccatctcccccaccccgtaaccccctcctgcctccatccaccggggctatgggccgcagaagaggtattgcagacggtggaccattataagactgagatagagaggctaaccaaggagctcacggagaccacccacgagaagatccaggctgccgagtacgggctggtggtgctggaggagaagctgaccctcaaacagcagtatgatgaactggaggctgagtacgacagcctcaaacaggagct

SEQ ID NO: 627 - DNA, 322 bp, homo sapiens
cagagaaacagattattcaacttaaccacagtttttgttttcaacaattgcaacagatttacccagggaagattacagtaaaataaaattttaggtcagaacaactgctgtcaaggtttaagttcaactagacagacaatttagccctgcccaaaacagggtgactgaaaggatggctgagtgatgttcctgaaggaatgacatggtgtctgccttgttggaggattgtgttatcccacataggaaccagacatgagagaaagcaaaactatgtgtcttgatgagactcacctggtgagaggtactgagctagtcttcagat

SEQ ID NO: 628 - DNA, 92 bp, homo sapiens
ctggaaaatgagaatgaccacccaccatacaggattatgtggattaaacaagctcttgaggcccaacatgtggcatgaatcagtgctccggg

SEQ ID NO: 629 - DNA, 449 bp, homo sapiens
ttccgcagccccaggaaccagccaagctaaatagaagaggccggcacaggtgtgctagaaccgggcctggactccttgtggcttgggaacagacctgtgaaagctcccacatctcctcgccagtcatcaccaactagtcaccaccaacaaggagatggcgcagcccgtgcctaatcacagcaattaactgttagggtctttgtgcaggaagcacacgatatgctgagaaaaaccagcttttgtctaagcatgcacctctatggactaagttgggtctaagccccagtcacatgcagactgggaagatgtctgctaggtaagtgttgagggcaggtccaccactgactgactgtggcagacttggcaacagcagctgtcacccacagcagtggcaattccccgcacctccccccccgaaactaggacatgtttggcgatgtctggagaca

SEQ ID NO: 630 - DNA, 234 bp, homo sapiens
ctcttcttttatgtaatgagtatcaagataatcctttttgcaaagtggtgaccctatggtagagtttggatctggggattgcagaatgtcactgggtgcgttgaagctgaaggcgtgcatttctctgagtaatgagaagcacccttgagtcaccaaggcactggcatatcaaaaagcggtgccgctgtccatatcttgacgattgtagacacagttgtagctgtatagagatga

SEQ ID NO: 631 - DNA, 296 bp, homo sapiens
  misc_feature (22)..(288): n=unknown
tcctcatctcatgtcacatacntcttccttcttaagnntganacganataatagcncttntnatatcctgctcgtccatttcgatctttttcagataatgattctgtcttcccagncatccccacaatgagatnagcatactctcaaagatctcggccaagtcattaataannannctgaacagancaggccaaaggnggncatnncannnttgcngggngattcngnccanagcagngnancctaaggcagccagagtccnncgagagccagttnnggtgacctggnagccagaa

SEQ ID NO: 632 - DNA, 396 bp, homo sapiens
acgactgcaaattgtgtgatgtttaattgtcacagaaagagatactcgttttaagcacttttagcctaatgtactggaaaattgcttaatggatttttatactctattggaaacatttccatattggtgaaatgccactcattcctttttctgaggagcaaatcttgagtagcaatgggaagaaagcctggcaacagccaccatttgtcttgtggacctgacatgcttattcacctagaaaaagaagaaattgctaaatgcacactgatacctcttaggtaaccacaggttttcattttgtgctgaattattagtcatttttcctttatgtttttagagtatgattcagagaccaatttattcccaaagaaaattgccattacatctactaggttt

SEQ ID NO: 633 - DNA, 321 bp, homo sapiens
aatggcaattttctttgggaataaattggtctctgaatcatactctaaaaacataaaggaaaaatgactaataattcagcacaaaatgaaaacctgtggttacctaagaggtatcagtgtgcatttagcaatttcttctttttctaggtgaataagcatgtcaggtccacaagacaaatggtggctgttgccaggctttcttcccattgctactcaagatttgctcctcagaaaaaggaatgagtggcatttcaccaatatggaaatgtttccaatagagtataaaaatccattaagcaattttccagtacattaggctaa

SEQ ID NO: 634 - DNA, 398 bp, homo sapiens
  misc_feature (378)..(392): n=unknown
agcactttgtgagtatggggtgaatcggcgtcggccttccactgtggggttaaatctcatcccgcggctctcctcctgtcggtcctgcagttcttttgtccccgggtagagggatcttctgcagaaatagcgctggaagctagagtgaggcctgagtactgccttggcctaggatggctagagaattaagtgaaagcacagccctggatgcccagtctacagaagaccagatggagcttctggtcataaaggtggaggaagaagaagccggttttcccagtagcccagatctgggttctgagggctcccgcgagcgcttccgaggcttccgctacccggaggctgcaggcccccgcgaagcgctgagtcggctccganagctctgccgacantggctg

SEQ ID NO: 635 - DNA, 492 bp, homo sapiens
gattacaatctctagtttatggagtttgggggacccaaacaacatcacagtacgtgaaatcacctaacatggcctggcatacgatatgtatgcaggtttccttccagacatttatagttattataaaattacagttttcaagttactttctcatgtgcagctcagaatttcccacatcctttataaagaatgaagctaagagactcgcactgactttccactgttacaggccttgggtgcaacagacccaagtcaagaaccctggtatccagctcaccatttagaaggctctggccacacaggtcctctgagggtgtgtgcacagggacacaggatgatgcaaagaggacacagtctcataaaacagggaagaacatggaggtaaaagtcggcccattttctaccagaggttcataaccagtggtccatgaactccttcccacgtagtccatgaacttgaacagggcaaagctaatcttatttttaactagt

SEQ ID NO: 636 - DNA, 375 bp, homo sapiens
  misc_feature (102)..(102): n=unknown
  misc_feature (213)..(213): n=unknown
gtgacttttgcccaaggaatttgagaaataaggcaaataagttgctctattttaaagtagtcattcaatataaatatattatatcaatcttaacttttttantctcctgatatgattaataatatgtatattcttacttttcttctaatgggcatatgtatccttgtggacactttgagagaggtttcttggactctcccatttatagaatcnttatactcttttactgtgtgggtccctgcttttaacagatttctgaggcaaatatattgtgctttttcttatgtaggaagaccagcgaaaatagttactgagttgtcaattttatcagtagataagaaactttctttattacagttcagggaagatttttca

SEQ ID NO: 637 - DNA, 308 bp, homo sapiens
  misc_feature (67)..(184): n=unknown
  misc_feature (305)..(308): n=unknown
gtaatcctctgtgaaaaactcttgcaaaagagacattggagtgtactattttcaaccctgagctttnacactgcntaccaanngggggtgggtcaagaagctggttagatcgaagcacaagcacaagccantgatattctctatgtgatcaggtttttacaaaaaaatacatagttttcaatanataatgcttaattttacaactttgatacagcaatgtcatacaccgtttcaacacactacactctgcatgctagatagtctacgagaagacgaaactttgccatgcattttctttccccccnagn

SEQ ID NO: 638 - DNA, 429 bp, homo sapiens
  misc_feature (249)..(249): n=unknown
  misc_feature (393)..(409): n=unknown
gcgaaactgagatgcgggcattgggccctgggaagcgtggggaaggggaaaggagaaagccaggttaactacgtcaggattaatgtgttccacttctgctgcctgagaaaatggagaaattaagtcctttccatggatcattccttctgtaaacagagatcacaaagcaagagcttcagcatcctcgtgaaaaagacattttgttctgggtgtcatcatctccttccactacagcttgcaattggaacnagcttcacatcctgggggtgctgcctatctctgtcttgatttctgtctgtctattcctcccattgacaggaatgtcgtttgtatcctccacgcagcagtttgcagaaatcccagcaaggtttatggtttatgttgccccacatntataaaacacaaacgntctcaaatgctttttaaaaa

SEQ ID NO: 639 - DNA, 479 bp, homo sapiens
tgggggtgtcaggggcaggggagacgggccctgggggtgtcaggggcaggggagacgggccctgggggcaagcgaggtttcagggtcacttggggtgtgcagagccaagctgtgaccctagtgccgtgttacttggcagaagccctgcctgttcccacatctgtaaagttaggcatttggggtgctccatcgtgagcctccttcctgctctaacattcagcgtgggtttgaggcccgtgggcatggagctgtccgtcacccttgtcagtcgggcacctcgtcctgggctcccaggtggaggtctctggaagcccttgctgagctgggctgggagctcctttgccctgaccttgttgttgccgttgacctccttcatgggagcatctggtcttgactggggcagccaccagcacatgaggctcccgtcttggaagcagggggcacactggtgtgtgggaactggcttaaggccctgcttc

SEQ ID NO: 640 - DNA, 539 bp, homo sapiens
  misc_feature (532)..(532): n=unknown
attactgccatttttaaatgaataaacctctaatttttcgattttcctttttgacagtgaatgtctaagccatataaacacagccttccgggccaggggttgccctgggccactcacaagagtgtagcttgaacaggagcttgaccgtgtagtggtagaggtggctgcagtcctggatgacctggatgaggggggccaggcggcactggcctgaggacatctgggatacggcgatggccgtgttgagctgtcggaaaactgtgcaaaaggggcaggaggaagaacgtgagcccttgggagctgggcaacctgtccaaggtggtccaactgtgaagcagggccctaagccagctcccacacaccagtgtgccccctgcctccaagacgggagcctcatgtgctggtggctgccccaggtcaagaccagatgctcccatgaaggaggtcaacggcaacaacaaggtcagggcaaaggagcttcccagcccagctcagcaaggggttccagagaccttccaacctgggagcccanggaacga

SEQ ID NO: 641 - DNA, 383 bp, homo sapiens
  misc_feature (97)..(97): n=unknown
gcctggggcagaaatggctgcaagtggccgaggtctctgcaaggctgtggccgcctctcccttcgcggcgtggagacgagataacacggaagccagnggaggtctgaagcctgagtatgatgcggtggtgataggagcaggacacaacggactggtggctgcagcgtacctgcagagactgggggtgaacaccgccgtcttcgagaggcgccatgtgatcgggggtgcagctgtcactgaggagttcatcccagggtttaagttctcccgtgcgtcctacctgctcagcctgctgaggccgcagatttacactgatctggactgaagaaacatgggctgaggcttcatcttcgaaacccctactccttcaaccccatgctgga

SEQ ID NO: 642 - DNA, 514 bp, homo sapiens
gaggcatgggcataaggtcaacttgcactaaatgtaactcgtacgttttttctaaaataatttcttgagcattgtggtggccttatgtactaacccgaagctgaacttcctgggaagctgatccaatggagcacttggaattcaggggtggagtcttcttcctgggtcagagctggttcagggtcacatgctcttgaggtccctaaaggccacatgtgctgcatttcgcccagcagctcccatcacacctcctccaggatgagccccacttccacagagatacaggccctggagagggcagcggtagccagaatgcaggggcacggggcgggtgaagtagagctggtccagggacatggcgcagtggaatatgttccctccaggaagcccgaagattctctccaaatctggtggtgtgaggatgtctctgccaaccacagagtccttgaagccaggggcatagacctcgatgcaatcgaacactctgtctgcataagcgtctctctcctgctcg

SEQ ID NO: 643 - DNA, 241 bp, homo sapiens
  misc_feature (45)..(45): n=unknown
aattttctgtatttttaaaatgatcatgtttttgactactaaagnacctatgggacttttggtgtatggttagtattttggaagtgtctagtcgaggtgctagaataaagggatataaaatttgcaaagctggacaaataaaagtcattggaggcaagtagagatgggaaaaaattcagaacagcagaatgaatcattctacttccatcatgctatactgaataatttaatttgcttgcat

SEQ ID NO: 644 - DNA, 500 bp, homo sapiens
  misc_feature (368)..(478): n=unknown
tagaaatggacatataacaaagagttcaatttgagaaaatgtggtgataggtagaacaaggagaaattgtttcaattctgaatttactcgcatattcctattagctgttactgatctaaaacatctccttaaatccaaaacaaaacaatagttacaagttcactgatgttttcatgggcactcacccaagtaatgtccaaacaatatttttccatgtcccccctcccccagaacacacacaggcaaaggcagagatgtttactgtgaggtcacatggcatgaagcaaatgcagccttatctgtttattattacaacagccagttagcattggcaaatgtgctttggttacaaacatggtttctgctantaatttcatgnagnagcttttaggatatgtgaccatttattcttagtataatcnatcnttgnaggntaaaaatcagagtataaaagtttatactctggcnaatataaatncatgcacagaagtttctgacag

SEQ ID NO: 645 - DNA, 290 bp, homo sapiens
  misc_feature (186)..(186): n=unknown
aaaacaataaatttatagtaaatgtggtattaaatgataccatagtgattcaagatatagttgaagaactattaattcttaagtataataaaggtataaaggtattgatcttacatttataaaataagaccttatttcttagagatacatactgaagtattacagaagaaattacatatctgagangggagggcagcgtatggatgaaataagactagagatgaattgataatggctgaagctaggtgttgagtacatgagagttcattatagcatttctctacttttgt

SEQ ID NO: 646 - DNA, 556 bp, homo sapiens
aggacgataaatgattccatgtggatagggcataacatacagagaatgagactatgccagaaatgggaggaggcatttgaaacaacatgagtatctcagggacagatggattgattctgctattggtaggcctggaaggcaaggtcagaagtagcaaaaaatggataccaaaagcactattagtcacccaagctaagtggaatagctggcccagtaggagaaatgcaggttttgctctacactaagttctccaactcttgataagcctccaaaaacaaatgttaggggaaaaaaacgcagctggttatgaaaagatatatctcatttcattaaaaaatcaatgtcaatgctgttaatagaatccttttatcttcaggacagaggcaatgccctaaacaaacaccagctcaagagcctctgatgccaacctagagggtacccaaacacaaacttagcatagaggtaagaatctctatgtcttttggtggaggcaaagccatttggttggtacttcacagggacatctttctaccaagtcttcatcatatgggatgtg

SEQ ID NO: 647 - DNA, 438 bp, homo sapiens
  misc_feature (126)..(126): n=unknown
agcacagataatggtaagtttaattagttacctttatgttgacagctgtaaaatatcagaaatgtgcttgatacttttaagaattttaataatttcctttgtcctgttcctcactacattcagagncacttctggattaattcatttgacttacagggcatgtactttgtctcctctgtgctgctgatccgaatgagtatgcctttagaataccgcaccataatcactgaagtccttggagaactgcagttcaacttctatcaccgttggtttgatgtgatcttcctggtcagcgctctctctagcatactcttcctctatttggctcacaaacaggcaccagagaagcaaatggcaccttgaacttaagcctactacagactgttagaggccagtggtttcaaatttgatataagaggggggaaaaatggaaccagg

SEQ ID NO: 648 - DNA, 534 bp, homo sapiens
tgagaagcagtgtttgacacccttctcccccaatccagccatcccccaagtctgagttaggtatttctcttctgtattcccatagcacagtgtaattcccctataatagcatgtatcaccttgaattatgggtgtttattgttctgtctctcctgttagaacgaaagctccatgaagggattgtcattttattcaccagtgtaccctctatgcccagcacaacttttggtcatattaaacaaagaatgaataaataaatccaagagcataggaggaggagcatccaaatgagcctgaaaaattagagaaatatttgtagtagtatgtgatatcttagctgagcttaacaagtataatgagatcaagagtttggattgaaaatgaggtactcaggaataaacgatttctgaggtctctaagatattataaaactttattgaaagatctaagaaaatttaatgaaacacattgtccttattaatctataaatatagttttaattaaaattctcccatctggggcctcccaaaacac

SEQ ID NO: 649 - DNA, 502 bp, homo sapiens
  misc_feature (198)..(261): n=unknown
  misc_feature (408)..(408): n=unknown
tcaccacagaagtatgatgatgcctgtatgcttttctaagtgtttttaattagctgaagaaatttccttttattgctagtttgttgtaaatttttatcatgagaatgtttaaaatgtgtcaattttcctgttgagaggattatattgtctttgtcaggggttagtaccaggtttaccagcctcaaaaaatgaactggnnnnnnnnnnnnnnnnnnnnnnnnnnnnnnnnnnnnnnnnnnnnnnnnnnnnnnnnnnnnnnnnaattaaaactatatttatagattaataaggacaatgtgtttcattaaattttcttagatctttcaataaagttttataatatcttagagacctcagaaatcgtttattcctgagtacctcattttcaatccaaactcttgatctcantatacttgttaagctcagctaagatatcacatactactacaaatatttcctaatttttcagggctcattttggatgctcctccctcctatggct

SEQ ID NO: 650 - DNA, 408 bp, homo sapiens
acacggtgtgacgggcacaggcctcctcagctggtggaaagggtgtgagtcccacaggtctgccattcccattagggtctttgaccttggccattgctctttgacttttttctggctgtaccgaggtttaggggagttgtagatatttgcctgaaaacctagtaccatggtctttggctcgggtgcctgagagacccgattcaaatcacattgtgcgagtgttctagagtgagggccggtgggggggaatgtaaccggaaatgccggcaggacttctggggccgggataagtgggatgttcgtttgattagatgcctcccttctggttcctgcgttgcccaccagtgtcccctcgagggacagtgacgccatcagcctgcctggcagccaatgtgacccctgccacca

SEQ ID NO: 651 - DNA, 457 bp, homo sapiens
caacaatcgtaagccacgcctgtgtacacagcagggctcctacgctctggcaaagcatccaggcctttttaagaccacctgttctaaaagcaaatctacaataagaatgcaaccaagccaggccgcactccccgctgagcacacgcctggaagcacgttctagatcctgcacccatctcgtctgcctccagccagggccctggctcgccagcctttggtctcgaactttgtttctgagaacacagcagacatacagggtgctgggagaggacaaggaagccagcccctagagcagcaggtgctcaccgggccgcccaccacactgaggccacgccagctggaccagcccctccagggcccctgcgcttggcacccggcgcccagccagctcttggttcccgtgagcactgtgtgcactcatttcatggcctgtttatctgcccaaccaagaaaacag

SEQ ID NO: 652 - DNA, 439 bp, homo sapiens
  misc_feature (4)..(4): n=unknown
  misc_feature (242)..(437): n=unknown
aaanaagatatttattgatggtaaaagaaatgtttctgaaactttttgttcatataatgtaattttgttatatatcattttatgaacaaaattacattataatatgtgtactgttacaaggagtatgttttgctttgcaggggtataatttagactgctttttattgtgtatagggggaggttgtcttgggaataagggaagattgtaaaatgtattcagaccttgggattttaaaaatatntatattttttatntantgaaaaatgcntaatatcaaataaaatgatgattctttcattaatgaagggtagaatacattagaaaaaacataaagataatactaatgntnaaattaggactttggctatgaacatggctatttaaaagctcanctttttggnaattatgcaaatgtaacaggaaaaaaaaaaaaaangg

SEQ ID NO: 653 - DNA, 493 bp, homo sapiens
  misc_feature (123)..(123): n=unknown
  misc_feature (460)..(460): n=unknown
gcagaaaatgtcagcagtgctgaggctgagaagtcgtggcctgaactaccctctgccttctagatccacacacagtgttcacatgggtgagactcccctctaggtgtcccctcttttttctantttaaaatttgttttaaattcaactttacagcagtaatcccaagagttttaaatagcaattatttgtcatgcttaattaactcctaacatgatctgtgtgcacctgtacacatttttcagctaattgcaaatcatactgaatacattatgttctcccatatataaaaattcatgcatgagcaaagcattttgaacatccatgaaaaaccccatggcgggcctgcatggtgtggtttgctaaggcatcccttggttgataggattcgtttaaaggtcctcctagtatagagtgcaatgcgataaacatttatcttttcttacctttgtcctgtctctntggggctgttttcaaaagtggaattgctggtca

SEQ ID NO: 654 - DNA, 374 bp, homo sapiens
  misc_feature (41)..(47): n=unknown
  misc_feature (290)..(325): n=unknown
ctgaatcgtgtgactgcagcaggtgtggtgctctacagagnaccatntcccagggctctctcttttccttttcttcacttcctgttttatgctcagttttctagcctgggaactgttcttctttttttttctttcagttttcctcatttaattatttttattccatgaatttaagaccctagatcttcatgtaaatgtgctctttgagcttcttaactggtctttcctatcagcagaaggcgatgtcttgtgctaaaatctcagtgtcaattcagtgatttaactaccanggctttactttcgtttcctttcatatcccaagnanttcttcacttctatctagctgtttgcttttatgtttgatcaaccatgaa

SEQ ID NO: 655 - DNA, 340 bp, homo sapiens
ctgggatcctctgcagctttgatcctgctcttaggaaaatgctggaggcctggtggggggtgctgtgtgtccactgtccgacctgccttggtgccctggcttctcctcccatgctgcgtctggctgtgccacttccccaagccagcaaagtctggtctgagagcataaaggatacggaggctggacttcccctggccagcctgtggaccactggggggctgcttcccatgcagtttgagtcagcaaatattgaccaggggctgctctgtgccaggcctcgggggagggctccaggccccgaggtgagccacacgcatggcagtctctgccctctggaagc

SEQ ID NO: 656 - DNA, 316 bp, homo sapiens
gcgcactgtgagtatttgggaatccaggatgctgcaggggtccgcagccgagagaagagactgctgtcctggtgcaggagcacaggcgctggtcagtcttggggagctcagattccacccagaatgggcaggggaaggggactgggctgaagccccattcggagctgtgtcattcccactcacaaagcccaagggcgtgccaggccaagtgctaagaagccagtatctatggctggagccaggggacatgagcagtgccccagatcacaggcacgaggacagttggccctgtagggcaaggcatctgctgacatct

SEQ ID NO: 657 - DNA, 540 bp, homo sapiens
aaaacgcgtccatgatgaggacgggtccattagagcccccaacgttctgtgaagtgggcggcacaggttggggaaggggacttaatggggttatgtaatttgcatgaaaatcacagaacctgaagtggtgggtgagattcaaatgccttggagctaagagcttggattcagtacttaataataacttgctgtgacaatctcagaaagaatccaaatgtcagagccaaattaaccagcaaaaaagacagatggaagtttttcgtcctcgcttagctcatagtcttgaaacacagccctctggttttcacctgcctggaacatcacagttggtggcaggagacggtaggtgggaagggccgaggaccggggggcctggtcaggtgtgaggtggcggcgggaacgtgcccttaacgctgctccgtcccttccagatctggcaggggatcgacattgagaccaagatgcacgtccgcttccttaacatggaaaccatggccctctgccactgacccaccgcctactccgcggagaaactgcact

SEQ ID NO: 658 - DNA, 456 bp, homo sapiens
cagaaatctgccctcaaaacccctggaaccaggaagcccagctctgccctcctcctggggccctcgggtccacgtcagctggaagggagacacctgggatcacagaggggcagctggggtggggctggagccaagaggcagtgatgggcagctgaccactccctcagacaggagctggcccatgcccctgccatcctctctgctcaactctctaccacatgtcacagctggcatcgcaagctaggggaaatagctggaccatgcacgattgtaaagaagacattcagctgttactatctgtaaatgatatgatgacagaaaaccccgaaattcacaggtaaatcatcatcataggagtgtggaagctgctggtacaaaatgagtcaagggaaggcgtgaagaagtctcgaagacctgcctgtagcagaactcaccccagaaccctcggggatgcga

SEQ ID NO: 659 - DNA, 540 bp, homo sapiens
  misc_feature (481)..(481): n=unknown
caggatatgcgtgctacactggaaggcattttggggggtgttcgcgataaaggcaacactttaaaaggcaaagaagtccatgtaagctgctctagaacgaagttcacaggtcacagcagctcctggcaggaggcagtactgttcaccgcaggagtggccgtcactgggcgggcgccctcgtcgcagtcccgagggttctggggtgagttctgctacaggcaggtcttcgagagcttcttcacggcctcccctgactcattttgtaccagcagcttccacactcctatgatgatgatttacctgtgaatttcggggttttctgtcatcatatcatttacagatagtaacagctgaatgtcttctttacaatcgtgcatggtccagctatttcccctagcttgcgatgccagctgtgacatgtggtagagagttgaacagagaggatggcaggggcatgggccagctcctgtctgagggagtngtcagctgcccatcactgcctctttggcttccagccccaaccccagcttgcccctctgt

SEQ ID NO: 660 - DNA, 417 bp, homo sapiens
cgtaccagggctgcaaaaagaaacaaaattaacctcatagtctgcatactctcgaaatggcaaaaaagcctgcaactttccgttgtggaaaataatatacctgggtgataaactgagcaaacatcacccttgcccttgcctctgaaagagagcctgttctagttcatcctggggccagcttggcctggaaccccactggccagctctgtccacaccttgcatattaggacagaaatctgcctaccacattccagctacataaagaaggtggccagcacctgactgcctctttctccttgtgaaattccttggaaataccatttgtgactgcttgggcttgttctgaagaaaattcaaatcttgttctgtttaacaaggattgattgaagaacccgtaggctcagtgctagtacaaag

SEQ ID NO: 661 - DNA, 349 bp, homo sapiens
taaaagatccactggctgctataggccaatgacagattaaagtgccgagttaaatttctctgcaagaaaatgacaccatttctccccttactatgaactcgaaatgacacctacatagtattatgctacacgtgccaaagaataacttagtactgtgagtctattataatcaggtaccatcaaaatcgcatcatattttcttactcagattttctcctggatgttatctgtgtttaaaatagaagtgaatttaaagaaatatttgggcctagattgaaaaatatttttgaaggtccatattctccggggaagaaaaatgagattaacaatgagaatgaggaagacaagt

SEQ ID NO: 662 - DNA, 82 bp, homo sapiens
gttcttggcactggagttcctgaaatctttggtatttcctgataactatgagtggaacatcttttgttatttataataataa

SEQ ID NO: 663 - DNA, 473 bp, homo sapiens
aaaacagttgagttggttctttctgtgactaagaataatgaagctctttgtttgatattaactgctggtagaaaacattaataaaacaatccaagaaaggtgttttaggaaacacagtattctcgtatgtagatttataagcacagaaaaatttccaacagtataaagttgtggtatagctccaagaaaagtattcttagttagaagaatttggctttgctacagagtttcaaaggttatgtgtgcgcatattgtcttcagtagatgacaagttgattttagttttattgttttatctggcattttccaataacattggtagtattctaatgagtaagacatttgactctaaagtcaaatttgacaacatatattcttaagccagtttagaaagtatagaatggtggttacattgtaaatctttggcagagtttttgtaagaaattcttaaatgaagttaacataacactgct

SEQ ID NO: 664 - DNA, 501 bp, homo sapiens
  misc_feature (167)..(451): n=unknown
caatcagttgtaggtaacaaatttcataagcatctaaactgacttcaatgtgttctaaggtgctggtttttccaaggaatttcctctgtatttcagaactgtgtaaaataggtccatagacttattattttatgtataatcaatcttctgtatccagggattctacnnnnnnnnnnnnnnnnnnnnnnnnnnnnnnnnnnnnnnnnnnnnnnnnnnnnnnnnnnnnnnnnnnnnnnnnnnnnnnnnnnnnnnnnnnnnnnnnnnnnnnnnnnnnnnnnnnnnnnnnnnnnnnnnnnnnnnnnnnnnnnnnnnnnnnnnnnnnnnnnnnnnnnnnnnnnnnnnnnnnnnnnnnnnnnnnnnnnnnnnnnnnnnnnnnnnnnnnnnnnnnnnnnnnnnnnnnnnnnnnnnnnnnnnnnnnnnnnnnnnnnnnnnnnnnnnnnnnnnnnnnnnnctcctggagccaaactctcacaaataccaagaaatgactatatttgcttc

SEQ ID NO: 665 - DNA, 390 bp, homo sapiens
  misc_feature (358)..(358): n=unknown
gctatatgaagctcttttctgtagagtattaaattgtgaaatcagtaataaaagtctgtgtgttaaaaatcgttagcacagaaacaaaaattttagtgtttgaaattttttaatttcattgacaaactaccatttttctctttaaatccgatttttctttgtgtctaagtatatcggatgtactggcagattagaaacattatcatgagtaatccttctcccctcaaaatatgattggtaccttttttagacctactctcagcttcactgtgtctggtaatttttttttaactaatcagtaaatagccctactgttatgtctgtgatggttcttaatgccctcggaaggagcgtaaantttctgggagggtttaagcttctcaagaatag

SEQ ID NO: 666 - DNA, 515 bp, homo sapiens
  misc_feature (471)..(471): n=unknown
agggagttgtggtgttgttggctgaggtgattcatctggactatcaaggagaaactgaactactactccacaatggaagaattgaagagtatgtctacagtacaggagataccttagggtgtttctcagtattactccacgttgtgattagggccaatggataactacaaaaatgcaatcccaggcagaactacaaatgggccaaacctttgggtcaccctgctgggtaaagaatcatgaggttcttgcagaaggcaaacaagaaaaaaaaattgaatagataagttataaataccagcaataaccatgtgaccagttacagaaacaagaactgtaattgttctaagtattttctccttatttcattatgaatgtttgtgtgtatatacacacatattaagcaaatatctttgctttctttcctgtcttattttcttatcatgtaacaaaagttgtattgactttatatcnatatttaagtattgttaattttacatcataatatttaagttaca

SEQ ID NO: 667 - DNA, 412 bp, homo sapiens
  misc_feature (366)..(392): n=unknown
aaaataagcagtttagattccgacgacactgcactaattggcatgtcagcctccagctcagtaaggcatttgctcatggttacaggcatcttttagattctaagagtgagttacagaattctttttggtactttcacttattctttcagaatacatcaaggatgtgatttatgggcccttaagagtataagatataggtgcacagtatgttacttaagtaacggatgagcccccctaaacatccacgtgtctctgcaggaacctgtgtaagtattgtgaaaacccttttcttccagggaaaaattattggaaattccttaactgagctatacttggtacttgctctagaacatttgggaaatgacnaactcaggctggctctcctctctaanctcactgggcataaatgttc

SEQ ID NO: 668 - DNA, 520 bp, homo sapiens
  misc_feature (8)..(17): n=unknown
  misc_feature (325)..(325): n=unknown
  misc_feature (128)..(496): n=unknown
agaagaannanagtacnataaaactataccttgcatacagccctcaaatagttggtatgtaaacacttataatagagttacaaaatttaaggtaaaaataaacaaaatactatacaaccaaggtcaaattattttccaatagattaatacatgacataatggttatacagtgccttgctcacaatagatactcaaatatttgacaatcgattaattggtgttctcatagactcctgcatttaagatcttcatggatagttcgtccacactaacaagaacctggatgtctctacaactctgcaattcaactgcagtcatggagaanaatccctttctgggaagaaacacccatttgccaggatctctgtggaaaaaaacagaaagctgagtttaggtgctctgatgtcattctctatttttataaatgnganagttgtggatgcagagaaccatttaaaggaaanctagtttgannaagcacaggtanggagaggtngggaccgaggccaagtgtaataat

SEQ ID NO: 669 - DNA, 418 bp, homo sapiens
ggggtgctccacacactcagaacactttcctctgcacttacttcattctggtttttcttttgggtccttggtgtttttaaataaaccctttcctgtagtttgctccccttccatggagggctgtttcgagcacagatctgctgggtgtctgtatttacaaagagaaggggccactcgtgtgtgagcagcaccgagggacagaggtaccttgcctgcttgtgtcccctccaagtccttctgatattttcctttccagctgttgcctagtttcctggtattaaggagaatcaactctctggataaacgtggtaaatatggcccatagtcccatctttttacaggcattttttacacctggagcagccagaggacgcatgcatggctcttcggaaggtaatttagggatcacccatgtaag

SEQ ID NO: 670 - DNA, 454 bp, homo sapiens
cttttagtaaggcatttggggttggggaagctagaaaaagaaatgggagctggtcacacagggccttgtgtgccagactaaggggtttgtagtatatattgtaggcagaagagatccatcaacagattgcaagcaaggaagtatgttcactttaaagtttgagaaagaatagtgtggaagcacgtctcaaatttagacttgttccccctctgaaccgtgaatcagaccatttcaggtagaagtcttccccggtttatctgatctactcggggcctcaggcttctcagctgggaagagaggatgcaagaccagactgaagaacacggttgagtccccaataccaaaagggggcctttctgcttcttagccagctacctcttcgagtttttcaaattgtgagggggaccataaaaggatggaaacttttagatgacattctacaaattattttttt

SEQ ID NO: 671 - DNA, 547 bp, homo sapiens
gaacaccagttgggagaatgcaatgattagcaagtatttgttgagcactaagtatgtgatagattttcttaatcagtccttataacaagcctatgaaatgggtactatcattactgcattttacaagtgaggaaacaaagaaaacagagtaaacatctgccaacgtttattgacagtgctgagcagtgacagataaatatttcgaacctaggcagtttgattctagaggtaaaatagtctaaacaagaattaaacgttaaactggtctaataaaatctacttatccagagaatgttttttaaaagaaacaggaaatatatggactgtaggataggtgtcataaaaattttgtttctaaatcatttagaatccactgcatgtattccaaattacaattatcagtgacattagaacttgatatgtgaagttcttcaagagtactttgtgagaccgatctccatttttttccaatgggaaattattgcaagttcctacatcttgatattgctttcgtaatttatactaacataaaataatatttttcatg

SEQ ID NO: 672 - DNA, 563 bp, homo sapiens
  misc_feature (205)..(380): n=unknown
  misc_feature (533)..(540): n=unknown
atacagaacataaatccaagaaaaattattattatttttcacaattatgactaaatcatgttatttctagttatttacaagtactacaatgttctatgcatttcttcatcctagacattaataaaacacatccctttggtcttagatacttctctttggtctgtgttttctcctttctgaattttaatcttctgtgatgtgaggnaatttacgtgaacctttcacntatcnattttttnccttgtgcacanttganantnnccncccttagatnccctatttgctcaaaaggcaaatcctctaagangtcatctgcagcccatagcattcgtctcagagcagaaaganttagaacatcctttacagggtccagctcccantcagaggaataattgctaaccaccgagatgtcagaaagagcaaatccaagttttctttggacttcctctagctgcaatacagaaattaaaaagacattgcaaaacagtgaaaaatattattttatgttagtataaattacgaaagcaatatcnagatgtnggaacttgcaataatttcccatt

SEQ ID NO: 673 - DNA, 519 bp, homo sapiens
gctttttgaaggaaaaggcttcattctccctgctcgaaagattgccacactatagatatttgaaaatcagatgcggtaatcagaaagctattctgatagtctgactgctctgccgatacaggttatattactctcacacaatatgttatcacgtaagggctggggaggacatacatacttcagtgggtaaactgaggttagggacatagggagcttgactgtgattccaagtatgtggtgagctcacaacccccaagattatcttatcctctaaacggtcttgtcatgcgcttttcaggagtcacattagaatctgctttctaagaccatatctagtggctgggctgttttttaatggatcacttccccttccatcttttgacactatctatccaattctcaggattctttgtctttcaaaacttcatgtgctgtattgaacttttcattttctcagattaaaggtggtcttgtaacagttagcatacttgcttgttcatccatttctttgttagacac

SEQ ID NO: 674 - DNA, 391 bp, homo sapiens
  misc_feature (107)..(336): n=unknown
agctgtccctgtttatcccaccatagaaagagtgaaaatcaacaaagttgggcagatatctgaacctgcttggtttgacttcagaagttctctcttgattttgtagntctttaactgnaatacanancaaancacagantgntccgnatntgnttacataatcntgggnngnnaacnngngttnngcancncaanncncnntngcngcncaagactnnnnnanaacatganaccctcacccnaccaannnnacacaanatnagttcaatacagcacatgaagttttgaaagacgaagaatcctgagaattggatagatagtgtcaaaaagatgganggggaagtgatccattaaaaaacagcccagccactagatatgggtcttagaaagc

SEQ ID NO: 675 - DNA, 434 bp, homo sapiens
  misc_feature (375)..(375): n=unknown
  misc_feature (500)..(500): n=unknown
gaggaaagctccccagaggtagtaccggtggaactcttgtgcgtgccttctcctgcctctcaaggggacctgcatacgaagcctttggggactgacgatgacttctggggccccacggggcctgtggctactgaggtagttgacaaagaaaagaacttgtaccgagttcacttccctgtagctggctcctaccgctggcccaacacgggtctctgctttgtgatgagagaagcggtgaccgttgagattgaattctgtgtgtgggaccagttcctgggtgagatcaacccacagcacagctggatggtggcagggcctctgctggacatcaaggctgagcctggagctgtggaagctgtgcacctccctcaattngtggctcctccaaggggggcatgtggaacatccctgttccaaatggcccactttaaaga

SEQ ID NO: 676 - DNA, 538 bp, homo sapiens
  misc_feature (500)..(500): n=unknown
cttccttccactttactctgttggcttgctcttgtagatcttcctgtacaaagccaagaatccacgtggcctcccacgctgaaccccaattttggggctcaccctgtgacacagccagaggcaaatggttccatgtccctcctattcctctttgcgcctggatgggatccggagggctctaggcttggctgctgtggccaccagatgaggctctatgaggtctgcaggggtcttgccagctccagatggacattccctgagatgctgttaggccacctggactggggccccctgtggcatccctggcatggacacataatgcccagcaaaggcatcatcaaagttccattactttagtgctggaaggcaaaccagatggcaacttgtttgcagagaaagaaactgagacccaaagaagggtcagccaaagccaggactcaagggtcaaggggctggtgttgatacttcagctgctgagtggcaggagtcctttttgctgnccttctcccagagttccataatgaggtgaggatgggtc

SEQ ID NO: 677 - DNA, 317 bp, homo sapiens
  misc_feature (69)..(305): n=unknown
ctaatgttctatgaacagatttttgtacgtatcttaaataattgcattaggctagattcttaaaatganaatcctatgtcaaagggtatgagtattttaaatgttcttaatatatagtaccctaccattttctggntggtaggcaattttggacaccttttcgtgttaacattgtcattgttttcaataggtacactatatctcnttaagtagagtgacctaanctagttctttattgttggatatttaggttatttttngntctttgctcttctaaggaattttctgaatatctgaatgttctnagcttttccatg

SEQ ID NO: 678 - DNA, 492 bp, homo sapiens
aaaatttctacattgtgaatagtacttcccagatgtggtgcacagtctgcacaagcataggcactggccctacatctaaatagatttttctggaatgaaagaatgaatgtattctattgatcctggttatgctttgaagctgtaatctgtcagtaccctctgtggtcactagataggaagttggagaatattcagagtgataaagagaagggtaatgggaaagtctaaatgagtgcttctcaaattttaatgggcgtatgaatcacccaggaatcttgttaaaatgcaaattataatttggatgtggggcctgggattctgcatttctcacaagctcccagctcacttatcatctgataagaatgctgttggtccataggccacacttcgagtagaaagactctaaacaacagtcaatcttggcttcttgctaagtaaatattttttagtaaaaattgtcactcttagttcattgaaattgattcagtattc

SEQ ID NO: 679 - DNA, 539 bp, homo sapiens
  misc_feature (171)..(234): n=unknown
  misc_feature (398)..(521): n=unknown
caatacttagtaatgtatatcattcatgtggtgataaatatattcagacgaagaataattcttttttttaaaatgtaaaatcacaattatttgatgtttttcatttgtgaatgccttttacacgtagtccctacatttaggtgctttggatgcatgacttttcactagacnnnnnnnnnnnnnnnnnnnnnnnnnnnnnnnnnnnnnnnnnnnnnnnnnnnnnnnnnnnnnnnnaacacagaaattaatagaatactgaatcaatttcaatgaactaagagtgacaatttttactaaaaaatatttacttagcaagaagccaagattgactgttgtttagagtctttctactcgaagtgtggcctatggaccaacagcattcttatcagatgataagnnnnnnnnnnnnnnnnnnnnnnnnnnnnnnnnnnnnnnnnnnatccaaattataatttgcattttaacaagattcctggggtgattcatacgcccattaaaatttgngaagcnctcntttaganttcccattacccttctct

SEQ ID NO: 680 - DNA, 437 bp, homo sapiens
  misc_feature (409)..(409): n=unknown
gggaaagctaattgacaggaaagagctaagtagtacaattttgggggtgacgaagctattttgctagtattactgaccatacatatgttgaattttataccaaaaattggtacattttattctaaaattatggctgaacaaagctgatttaaaaatttaggtaagcataatattaaatatttggaggtgactaaagaaatatgtaaccaaaaaacccataataaaatgcagaaatgaatatacgtagcaaattaatcatgctacatattgatgagattatcacaaactagaatattttgataagaatttgaaatttaaattatagtcacaaatagtaaatatgaaaacattgcctattaaatatgcttttttaataggaaataccaatgacattgaccccaaataaatntatcagggtccgaagtcattcatttcct

SEQ ID NO: 681 - DNA, 475 bp, homo sapiens
  misc_feature (168)..(168): n=unknown
  misc_feature (350)..(459): n=unknown
gagttttaagcaatttttcacatgtttttgcctacattttcaaatgatgtgtcaaaatgacagaaattttgatggcactttattgtactgtgatatattacacttaatgtttctattttcacttaaaattaatgatgcacattgaagcccacacattctcttttagcnaattcataatttcattcaatttggggtttttaattaataagtcttttttacttaagcttatttcttcactttttaaatgattttatttacgatttgagaaatgatgacttcggacctgatatatttatttgggtcaatgtcattggtattttctattaaaaaagcatattttaataggcaangtnttcatatttactatttgtgactataatttaaatttcaaattctnatcaaantatnctagtttgtgataatctcatcaatatgtagcntgattaatttgcnacgtanattcatttctgcattt

SEQ ID NO: 682 - DNA, 316 bp, homo sapiens
  misc_feature (2)..(13): n=unknown
  misc_feature (255)..(313): n=unknown
anttgtccccatncttcctggactagattgcacagtgtccttttcttatttggaatgttcaggacaatgtgttattcatctgcgcagtcccagcaccttgtgtgatactggctatccaatggggtgtttgatgaataaatggtgcattagttaaacaacaggtttaataggtatttattaaactgagcagctatttcaacaaagccactgaattaccacaatgccttgttgtctaaggcactaccaaaggcattncnaaactgctggtggaggccaattatttaagcaaatctcggatgtcnaagaaaatgangca

SEQ ID NO: 683 - DNA, 327 bp, homo sapiens
  misc_feature (134)..(316): n=unknown
tagcaagtgaaaatgtccttgaaaaatgagttaacacaaagacattttcggataaaagacacttctggccttctgatgactacgagtttcataatataattgccaagccagatcacctaaacactaaacaaacnatactcacgcaaatgaagcttccaattattaacatgctctggaaaataagagtaattattgaatccagaaactagatccgggtattagnaacagaaaagggaacatttggaaaacaaaaagggncctttgaaattaanatatntgcnagntgaaaggacattaaaanaggaaatntaacccnaatggaaaatt

SEQ ID NO: 684 - DNA, 275 bp, homo sapiens
tatcttttaactcttctattgaatttttcatttgtgttatattttcttttttaatgttctttcatcttgcatatattttaatttcaaaggaccctttttgttttccaaatgttcccttttctgtttctaatatcctgatctagtttctggattcaataattactcttattttccagagcatgttaataattggaagcttcatttgcgtgagtattgtttgtttagtgtttaggtgatctgggcttggcaattatattatgaaactcgtagtcatc

SEQ ID NO: 685 - DNA, 60 bp, homo sapiens
  misc_feature (6)..(56): n=unknown
ttccanaatccttaccctttatttcttncntctcttctttnatcatnggatctntnaccc

SEQ ID NO: 686 - DNA, 471 bp, homo sapiens
  misc_feature (436)..(460): n=unknown
ttaaagctcatctctctgggatgacaacaaagtccctctcagttttttctcccaccccatccctcagccagctgaggtccatgtggtacccaggaaacagaacagcccccaattcccatggtgagtgctgtcatccacgttgtccttagttgcaggagacccttgaagattggtgtcttccccttccacaggtcgttggggcatgggaatctttgctgaggctgaaaatgcccctgtcttctgagatgctgcccttcccccagggagctgccagggctggaggtgcaggttcctgctgcttgcatttcctccaatcatgtccccttccccagtcacagagaaggctgtatgttctctctcctccatcaaaagctctcctttctctcccttaccctatccacatataatcttacataatgagcttaggcctcagagnaanacaaaaagtctgggacaaaantcctagtggga

SEQ ID NO: 687 - DNA, 520 bp, homo sapiens
  misc_feature (360)..(423): n=unknown
attcctatatagtgagagaaggaaatataacaggaaaggataaagagccaagtaaggctgtgttttctggtaaaggctagctacggcttaatccagaggggaggctcagaagcataaaccacaccgtggtgttgacccttcttgaggcaaggaatccagcagtagtcccatattagtcattcactgtctgaggaccattcccagaggagatataacttcccaggggtggtggttctcattagaagatggcaattctctgaaacatttgacattgttagcagttgacacacagcatctagaggtgtgggtgcactgccttgctaaatggggatctgggtaagacattattacattacaagnnnnnnnnnnnnnnnnnnnnnnnnnnnnnnnnnnnnnnnnnnnnnnnnnnnnnnnnnnnnnnnnaatattgaattaccttcatgccatattaaaactttaattccaagcattggaaatatatatattaaaggttgttacacaattaacatccccagaaaaa

SEQ ID NO: 688 - DNA, 467 bp, homo sapiens
  misc_feature (447)..(447): n=unknown
gatggcgtgaagaactgaaacgcactggtgctccaggagccttccacagatgtaaagttgtcctccttgttagaactgataagcgaagtgattctcttataagagttttggaggctggaaaggcaaatgttattttaccaaaaagttcaccaagtggaataactcatgtgattgccagtaatgcaagaattaaagctgagaaagaaaaagataactttaaggctccattttatccaattcagtatctaggggattttcttttagagaaagaaattcagaatgatgaagattcccaaaccaattctgtttggactgaacatagcaatgaagaaacaaacaaagatttcaggaaagatgcaggatttcttgaaatgaaaggtgccttaagagagaccatgtatagaacccagaaagaaatgccaaatcctgaagatgttaatggtgggntcctaatttggattcaacat

SEQ ID NO: 689 - DNA, 420 bp, homo sapiens
  misc_feature (18)..(109): n=unknown
  misc_feature (223)..(387): n=unknown
ctcattttaacaaatttnanaatctttactggaaccactgaatttttcttttttgtgatgttgaatcaaaatanaaccannatnancatcnncangatttngcatntcntttccgggttctatacatggtctctcttaaggcacctttcatttcaagaaatcctgcatctttcctgaaatctttgtttgtttcttcattgctatgttcagtccaaacagaatnggtttgggaatcttcatcattctgaatttctttctcnaaaagaaaatccccnagatactgaattggataaaatggagcccttaaagttancttnttcnttctcagctttaattccngcattactggcaatcacatgagttantccacttggtgaacntttnggnaaaataacatttgcctttccagcctccaaaact

SEQ ID NO: 690 - DNA, 315 bp, homo sapiens
  misc_feature (277)..(288): n=unknown
gtttctaaatattcttgtaattttaaaactatctcagatttactgaggtttatcttctggtggtagattatccataagaagagtgatgtgccagaatcactctgggatccttgtctgacaagattcaaaggactaaatttaattcagtcatgaacactgccaattaccgtttatgggtagacatctttggaaatttccacaaggtcagacattcgcaactatcccttctacatgtccacacgtatactccaacactttattaggcatctgattagtntggaagtntgnctccatctggaattagtccagtgtggc

SEQ ID NO: 691 - DNA, 486 bp, homo sapiens
  misc_feature (2)..(21): n=unknown
  misc_feature (295)..(295): n=unknown
gnganaaaatatatcaatatngaacaaaaatgtgtgtaaacagtaattctacaactgggaacatatctcagttttgttaattttggtgacgtcttcccaaccatgtctaatcttcagtatcttcttcctcaagcatggcaggaatagtatgcttttaaatatcaggacaacaattggaaggaaaacagctatcataaaagttggaggtgtataccatacaaattgttttatatctatccacttattccaggcaaaaatcaatgcgtgtattgtgcccagtagaagggaaacaatncctagcttgctctgcaaaagaaaaacaaaattggtgaagattggtttaataagagtttatcccatcctacctcatctggatatgctctgttgcttggaaatcctttatctatgattgttttcctatcacatttctcaacaatgtccattcacatctttctactctttttgcctatcctcctcaccttactt

SEQ ID NO: 692 - DNA, 290 bp, homo sapiens
  misc_feature (51)..(51): n=unknown
  misc_feature (169)..(258): n=unknown
aaagatacgagaaccttaaaagcaggtggtcattgacttcaaggggacgangtcgccctccccactgcctctccccatacagacgctgacagaatagacggggaagcaactatgagagaaacagaagcaatcagaactccagctcagacgacctcaggagttttaccancaggatgattcaggaccacacacaaaaaatggcagggngccatttcccccgaatctctcccgcataagatggaaacaacaacttgaggnggcaactgagcaattagttactggtcgtttct

SEQ ID NO: 693 - DNA, 558 bp, homo sapiens
  misc_feature (518)..(518): n=unknown
ttttgcgtttacagaagtttgtaggattgagaattcatcatcatcattttttttaccaatctctatatttttaatagtcaacatatttatttttgattcccccactgtgctgctttaaattaaattttgaaagaattctgcccaaagcagtagtgatactgaggatgaaataaagacagaaagcaagggaactacatgcttctggacacgtgttctatagacttgctctaactagtgttaaagactactcatttttttcctcacatgataagaacattcatattagactatttggtttactgttctaggtaatgattttttaaaagattgggttaagatgaaattattttcttacaaaaggatttaatttgcttttcaaattctgctctgaagctcaagattaaatcatgtcccaaatgactgagctttcattgctatagaaaagcatttggctatttcagtaagtttccgcctccacatcttaagtctcttgatttttcagaaaaggtcaggggagnggatataagcgtgaagggagggagattttcttaaaattgg

SEQ ID NO: 694 - DNA, 432 bp, homo sapiens
  misc_feature (52)..(79): n=unknown
  misc_feature (306)..(412): n=unknown
ctcattgttttctgaagctttaaactttgagatgtaaaaacatgacttttgnntgtgtacttttaaagatacatattnntttttaataggtcagtctcatcattaatcactaaaagagctatttaaatgactaaaaaccacagcacttgtcagccattacttgtttttcagcaagcatttacacagtattagctgaaatatttgtagggattcaccaagtaccttgggatgttgcagttagcatttttttcttacaggtataaaaagtggattgttgttttgatggtggtgggttttgtttttttntttcctaatcaaagcnctngngtnttattagcaaacacttaanaaatatgtnantaccagnactggggaaaataattagangacacataaacnggatttaaaatcnatctcatcggcctagatttt

SEQ ID NO: 695 - DNA, 471 bp, homo sapiens
  misc_feature (349)..(461): n=unknown
aaaaatatctttaaaatgataaatataaaacattaaatggctattactattttcttcctttttttttacacagtggcattacattaaagcccagaaaatttacagagaccattaaaaaaaggcattttgctaacaaataagaaggcaatttaaaataaaaccagtgaacatcaaaattatatttaagtctaacttgaactcttaaagacaaactatgcaatacaaagctataaaatatataaaagcaaatctataatatgttggatgccctccctactttggatgtaagatacatttttttctgtgcttaaataatacaattattttgctttatgaaaatgtgtagganaacattttaaaagaaaatgtgttttacctccctataaatggacatatgggcattatggtataagtcatncaaaacatgttaatganacattccaagtaaaatnaagaacatntgaattttaa

SEQ ID NO: 696 - DNA, 402 bp, homo sapiens
  misc_feature (180)..(368): n=unknown
gaaggaagtctggcaggctcggaattgtcatcttcctcaggcaaatagtttttcaccttagagccagcaaggccaaaccgcccagtcacccgacttcccacagtctcagcagggaggaataagtttttttcatctgtaatttggaagccaagtcagtaacaaaatgaaaccagtaaagcntctgttgaccaccagtaacaaattggcaaatgttccagcnttaactactaaaaaaggactacataatttaccattatcacctgagctaaaggaaaaacataatgcaaaattanttcangataaaattgaaccaatggtcctaagatctccaccaacaggagaatccattttacggtatgctttgcccnattccatcgagtaagacaaagaacttactaccag

SEQ ID NO: 697 - DNA, 557 bp, homo sapiens
  misc_feature (544)..(544): n=unknown
tgaacagctagacaatgcactgacaagatcctgaagaatatgtctattagctcccccaaagaccaacatgattgtcctatcctgctactatataaatttatgcataataatttaataaaatcctagtttctatattttatcctatacttttaaatcactttattggtatgtaatttgtgtataaaaagctatacattggtgagatcatcggaaagtgccgctggtggcgcgggcagagctggcgcgtcactgtcgtcatcgttgcccaaccgctttccgggaggctggagtcgaaggccgtgagtcagccataacggcaggtgaagaaattaatgaagactatccagtagaaattcacgagtatttgtcagcgtttgagaattccattggtgctgtggatgagatgctgaagaccacgatgtctgtttctagaaatgagttgttgcagaagttggatccacttgaacaagcaaaagtggatttggtttgtggttctgttgcagaaacatctttaaattcatcagttgagtgggcttctaagaantcttcaattttct

SEQ ID NO: 698 - DNA, 456 bp, homo sapiens
  misc_feature (47)..(47): n=unknown
  misc_feature (279)..(413): n=unknown
gcgaatgtgaactgggaaaaaaagcattatatatcataactaagagntaattgatgatacttgagaaatcggtgaacaattaatatttgttaaaccattgactaggatgttaatttttcatttgaggtattttttagtgaaaggagagaaggaaatgaaatggtagctagtagatggtgaatttaagcaagatttgttccctttcttccactatacgcctctaaggaaattaaaaaaaaaaaaggcttgtttactttggaatgtggagtaaagagagcnacaagngattgaagtcaaagaataggtangtgagccctgtaaggntctgcagagacagacagaaaaagtctgcatggagagtaaattgggaanccaattaaaaaattttggtagtccttgcgtgaaatnttggnagcttaaactagggtagtagttgtggaagggatgattattggt

SEQ ID NO: 699 - DNA, 327 bp, homo sapiens
  misc_feature (9)..(9): n=unknown
atgattttnaatataaaagtgatcagaagagttgaacactgaatgtgaagaaattttaggaatagcttagccagtttagattgcttatattttcttatttgtacatgatatatggttcttacggtttctaaataagtctaaagagctctttcaatatttaaaaaataaataaaaaatgtaagcagtaagaaagcatgtgtcatggtttaattgactattttcttccttagtggtatataaaatggtgcttcatataaacagtactgtcttcaatttgatgaaacgagtttgatttactgtcctactgttattttactgcttcctatt

SEQ ID NO: 700 - DNA, 425 bp, homo sapiens
  misc_feature (13)..(417): n=unknown
gtttgggcgcganttactctaagcgcggctctcagaagggtgcaagaagaatcagtgnttttttttttttttcgaagcactgngtttagntcaagatgtctggtaaagcaaatgcttccaagaaaaacgctcaacagttaaaaagaantccaaagagaaaaaaggataatgaggaagttgtgttgtcagagaataaggttagaaacacagtgaaaaanaaataaaaatcatctgaaagatctgtcttctgaaggacaaacaaagcacactaacctaaaacacggaaagacagcagccagcaagagaaaaacctggcnacctctgtcaaagagtaccagagaccatttgcnaactatgatggaatcagtagtaatgncanttttgngtancagtgttnnngnanaagaaggaantacnataccatc

SEQ ID NO: 701 - DNA, 431 bp, homo sapiens
  misc_feature (251)..(288): n=unknown
tctttgccaacctacgaaacccatatctggaagaatcaccagctcccgtgagcagcttcatgtaaatagatgcactccaagcagattgcatgcctcaggtgtttgtcttctagtaatcatggagtgtgcaacacccagagtaacactacaaggggcaggactgcaaacagcaggtcctggctaaaaacccttaatgctgcattgctgccagttgtaaagagatgcctgaatggaggcaagttctgccctgngggtgaaactgatgatgtactgtactgtcatatatanatccactaaatccagctaccaggaactgcctggaactgtggccatgcatttttttttttctttaaagaccagtgtgatagtaggccatgcatctgagatacgatattccttggtaactagagggagaaaaaaaaaatcaagta

SEQ ID NO: 702 - DNA, 307 bp, homo sapiens
  misc_feature (30)..(264): n=unknown
gtgttagtccatttattgtttaaagttatnttgaaactgatattttcactgctgccaaagcagtacctgacagtagataggtnnccacagncttangtnccttngagttatanaactatgcctctgaaaggggntttaatactttaataaacctggcctaaactgttttatttctaagttgaaganactgattgtcaagtactttgacttgtccaatctcatacaactaactatggtacatctagagttagatctcagtatcangggtcccagttgtattctgctcaccattccacagtttcggtat

SEQ ID NO: 703 - DNA, 393 bp, homo sapiens
  misc_feature (337)..(366): n=unknown
gaagatgattcaaagagcttgctttcaaagagcttacagttctacagcttagagatgaaaataaccaaaatatgaggtagaaagtggttaattttacctctccttggctttacgtctcatgtgtaaagttatagggggtgacagttcatgctttattgaaggacatgatatttacgtcaggctttgagggacagatcagatatagacacatgatggcaggaaaggctggagaaggcatttcagattgaatagcaagtaattccacagtaggaaaattgtgagaaagctatttctttgtatcaaattttaagaaaaatatttagacatgcttaatgcntaaatatttganattntattactttnntncctgtgattattttcacatctctcacc

SEQ ID NO: 704 - DNA, 281 bp, homo sapiens
  misc_feature (210)..(273): n=unknown
taacacaaatcaatttttttaaattacaagtcatagtcacatggtagcccaatctgaattttcatataatgtcatataatttcatataatgtcaaatttagctgtctggtaatctccaattaataactgtgtaacattagttttcttagcaataaaggaagaggacttaatcactatcatcccttttagttaggaaaaaagtataatcantcaaattagctcggttaaaatagcaatgttttctcttttgntttgatttgggganaactantncagaagca

SEQ ID NO: 705 - DNA, 376 bp, homo sapiens
  misc_feature (46)..(48): n=unknown
tcctgtctggtgaaatacaaacataaatgaattatttatgtgccantngcttcctgatgctgagagcaaagccagttgttctggcaggttctggaaaaatttatcacctcatggggttcaatgccaatgtcaaatcataaatataataatcaaatctgaaagtgaacccagtttcagagacatccagaggccactgtgtatgaagctcctttcagataaagagaagatattatttgacttcttatctctgttgtctggcgcagtgtccggaacacggcagatattccatatgcacagtcacatcctgtgtgtgtgtgtttcttttccagcagggactggaggtcctaggctttgtttgtatggcgagccagtgccc

SEQ ID NO: 706 - DNA, 480 bp, homo sapiens
  misc_feature (121)..(472): n=unknown
tttatcattttactaggaactatttacagaataaactaatgagattcttcctgaggtaaaaatactttttggaaaaacttctccttgatgaaatttcacttaaaacatcacttccatcgtnaagtatttctttaagatatttttggtcccttccttttatgtggaatcgtcaattcaaattttaaangagactttganatgtttttcatctatnattttaaaaatnttnaaggggtntttaattctgccttcaacanagatngacacacntctgattatgatgtaaaactgantaagttactctgacaggctttcttttctgcagcgcagtacnatcattnttaataangattgaattcttttactccatgcacaatctatattccctgctttacaaagattagaaatctaattctcactannaaggcagataaaagtaatcacttcnacctttcagatgactgaatcantnaccaacgc

SEQ ID NO: 707 - DNA, 429 bp, homo sapiens
  misc_feature (101)..(240): n=unknown
  misc_feature (384)..(394): n=unknown
cagaatttctccatctagcggaacaacagtgacatctgtggtgggattttcctgtgatgggatgagaccagaagccataaggcaagatcctacccggaaangctcagtggtcaatgtgaatcctaccaacactaggccacagagtgacaccccggagattcgtaaatacnagaagaggtttaactctgagattctgtgtgctgccttatggggagtgatttgctagtgggtacagagagnggcctgatgctgctggacagaagtggccaagggaaggtctatcctcttatcaaccgaagacgatttcaacaaatggacgtacttgagggcttgaatgtcttggtgacaatatctggcagaaaggataagttacgtgtctactanttgtcctggntaagaaataaaatacttcacaatgattcagaagtt

SEQ ID NO: 708 - DNA, 283 bp, homo sapiens
  misc_feature (10)..(277): n=unknown
ttggagtaanaaaaaaaaaaagaatggggataaactggtatataagaggaacangnangaggggagannacccaacanatgaggtctgcacacacagctgtcctggttgccctcggtgcagctccgngctccagttacaaggaattccaagttctcaggntcttgaagactctgnaggccattaatccctggatcacactgcntctaccagctnagangnnaagtcctgcctaaggtcntgaaatanacctgactgctgcnaccagaccgaacagangcaaag

SEQ ID NO: 709 - DNA, 369 bp, homo sapiens
  misc_feature (174)..(280): n=unknown
  misc_feature (481)..(481): n=unknown
tctgacattctttatgtaacagtacaccttggatcttcctccatcatgagtatagaaagccctttatcatcccttttttggttggttgttgttctgcagtattggtttcatacttaaatttttcatgcttataatagtttagaggagatgtaacaaatacagggatacaaaggnnnnnnnnnnnnnnnnnnnnnnnnnnnnnnnnnnnnnnnnnnnnnnnnnnnnnnnnnnnnnnnnnnnnnnnnnnnnnnnnnnnnnnnnnnnnnnnnnnnnnnnnnnntcaaggtctcagttttcttatttgtaaaatagttattaacagtatgccctgtattatagagttcctgtgaatattgagttcctattttt

SEQ ID NO: 710 - DNA, 534 bp, homo sapiens
  misc_feature (481)..(481): n=unknown
gaatttacaaaaaaaaggatgaaagtttacaaactgcttagttccaactaagcataagaggtgagaacgtacactgcagggccaccagcagcagctgtgcactgatgttaaaactggctcccccagacttgtagtgctgtcttcagggggctgcattccttacacgccacctcttgtgacataggtcattggtcaagccgctggaatgctacagaggtttttttggttttgagaggctttttttgttttgccttcctactataaaagcgaaattttcagttcatttctgaaaaataaattggtcaataaattcattttgttctgcttctactttacacaaagcttcatattcaacccgatacctgaaaaacaaaattgttagaggccctgaaaaaaagatgaagtaaaccacagacctaattcttctagagaaggatatagaggtttaaatgatttcaagaaatggtgtgagttcagaatnaagaaagaaagagggcaaagccctacccagagccacccatggagaaatctcca

SEQ ID NO: 711 - DNA, 389 bp, homo sapiens
  misc_feature (310)..(354): n=unknown
gttttgttgtgttcttcatgtggaaatgtcgcttaacaaaatatccaggcttttgtttacgtggaaaaagcatcccttgtaatgattgctcatcatacttaaaaacctttttcaaaggattttcatgttcccagctataaggactatttccatgacgtgttattggcagaatgagtgttaaatatggagcatatagcatggggtgactttcattgtcctaacctgagacagttttccttattactctgtattgatcctgctagtccaagaatggacatgaagtgaacctatcgtggtgactgggatacgnaggtgcttgctatttttgccagcacagcatattagttccttggngcctccattgtctgagtctgcagtgatctgtagga

SEQ ID NO: 712 - DNA, 363 bp, homo sapiens
  misc_feature (350)..(360): n=unknown
tagatgaaaacctaaaggtctctacgcaacatctgaggaacatacgctcctcagataaaagaatcaatctaaatcctcaactgacaaaaaggtccatttaatatttttcattttacaagttaaaagttctagttttgccaccagaatcacgactacccccccttcagaggactccatttaagctcaaaatacgaaatgagcatagggtgaagttgatgtgtaaatggtattctacagattcaagatggcctcttctaaaaacactgaagaaagctttcaccaactctaatttgattttgggttttgttggcagaaaaagcccaagacatctggaaaattactagtaaccnccgncatccncct

SEQ ID NO: 713 - DNA, 313 bp, homo sapiens
  misc_feature (47)..(49): n=unknown
attgactagaaggacatttggaaaagaaaacccagcgtttgaaaaanantgaggcagtttgattctgtttctctgagtgaatagtgagactaagtggggtgtaaggatgtttcatcctcaaaatttattttttctttcattactatgtcagtttgaaaaagaaaataaaaaatggttgttgatcctgaagaaactaatcctagaatgtgctacatctttgagagtttggaaagagacagttaacatacaacccttcaaaacagtggaatttggtaaaaccctggaacactgttcttgctggatctaattcatg

SEQ ID NO: 714 - DNA, 382 bp, homo sapiens
  misc_feature (3)..(5): n=unknown
  misc_feature (279)..(373): n=unknown
tcntncccaagacaccttgaaacaattgagaaatgaaaacccagagtgaactgggttataaagtttgcagctgtcttatggaaagaaaaatcttcagtatttttcactgcagcacttgacactctggctctgagtcttccttaaacacacacagagtcctttattaaaacaattgtagaaaacaaaaagattctgcttctactacattaggagggaaacgcctcagtgaactaggaggcctttcccgtgtcttaaatcagcaacagcaaattgtcttcnnatataagcatgtttacatgttcacatgtagncacacctaccagnacaaaatgcaggnagnaagcttacgtgcaaatatanacgccctagactntggctatag

SEQ ID NO: 715 - DNA, 387 bp, homo sapiens
  misc_feature (240)..(343): n=unknown
  misc_feature (463)..(463): n=unknown
cctgaagtcttcccacaactctagcaggaccttctaccgctttgaggctgtgtgggatagctctctgcataactcccttcttctgaaccgagtgacaccctatggagaaaagatctacatgaccttgtcggcctacctagagctggatcattgcatccagccggctgtcatcaccaaggatgtgtgcatggtcttctactcccgagatgccaagatctcaccaccacgctctctgcgtanctctttggcagcggctactcaaagtcaccagattcgaatcgagtcactggcatttacgaactcagcttatgcnaaatgtcnagacacaggtagtccaggtatncagagaaggagaagaaaaatcttagatacgtcagtggccatatg

SEQ ID NO: 716 - DNA, 486 bp, homo sapiens
  misc_feature (463)..(463): n=unknown
agggcactcggcagagtcacttagtatttcgactggctcgggcatctgcgggaaagctttgaccgtattgtgccagctagaagtgggttgaaggcatacaaccagtcgttcatgtctttgtcattgagggcctgcaaaaggaccccacggtgctttgtgcagacagcaaaggtgtttggtgtcttcaccatggcctgctggtcctcactgtactccacctgtgctgtggacaggttaatgattccacgctccacagggtctttgtcactgttatagatgaagacataaggccgacggacgacaacaaaatgtttagcccagttactgtaaagaggctccttgaaatgaaggtatcctttcttagagaccactgagcttggtctaatttcttcaatatctggaacaagattgagaaattcgttttttcctgctcgggccaaatatggtgtttccacagctgggncaatctgaaactgttcaaattct

SEQ ID NO: 717 - DNA, 277 bp, homo sapiens
  misc_feature (50)..(50): n=unknown
  misc_feature (229)..(229): n=unknown
ggtctcctctctctctggacattacacaggctcgggcctccatggaatanttttgcacttctgctgcaggtagaacaagtcagccagttggctgtgttcatagaggcagcattagactatcacagacagtccacagagattctgcaggagctgcagagcaagctacagatgcggtaagcacctccacgtttcttacaagccaagggctgcggaggtaacatctattganatccatctgtctgtctctccatctctccatcttcccccttcccctgcc

SEQ ID NO: 718 - DNA, 474 bp, homo sapiens
  misc_feature (49)..(49): n=unknown
  misc_feature (411)..(411): n=unknown
tgttaaccatgatctgaggtggacttttcagccctctcaagtcaaaagntgaagcagaggacacagaaactatgcattctccttagcctggccagatccactgcatggtcactggtctcttatcaggaagcaatgctggttagttgttttgtcctaactgcaaaagggaggggcagtgtcaggcagttggttgatgtcaggtggagcaagtcttttcagagggctggtttctgtttaactttctgtttaagaaagcctaatgttggtaagtgaaggagggggtataaagagatgtgtctgacctcacaccctgttatggccgagaactcagttttcaaggtttctctggggtccccttagtcaagaaggagtctgttcagtcacttcagggcttagaattctattacttcncagtgtctttgtcatgtttattgtctgtctcacttgctcacttggtggttacattctacaaca

SEQ ID NO: 719 - DNA, 464 bp, homo sapiens
  misc_feature (382)..(386): n=unknown
ttgtagaatgtaaccaccaagtgagcaagtgagacagacaataaacatgacaaagacactgagaagtaatagaattctaagccctgaagtgactgaacagactccttcttgactaaggggaccccagagaaaccttgaaaactgagttctcggccataacagggtgtgaggtcagacacatctctttataccccctccttcacttaccaacattaggctttcttaaacagaaagttaaacagaaaccagccctctgaaaagacttgctccacctgacatcaaccaactgcctgacactgcccctcccttttgcagttaggacaaaacaactaaccagcattgcttcctgataagagaccagtgaccatgcagtggatctggnaaangctaaggagaatgcatagtttctgtgtctctgcttcaccttttgacttgagagggctgaaaagtccacctcagatcat

SEQ ID NO: 720 - DNA, 473 bp, homo sapiens
tgaagatggagctaatctttcctctgctcgtggcattttgtcgcttatccagtcttctactcgtagggcataccagcagatcttggatgtgctggatgaaaatcgcaggtgattggccatccgtgactcttgacagctttattgcatattttttggcctcttgtttagtggactgtggtgtctttcttttctgtttttaccttctagcctctttctaagatgcaatgatttgaaacagcttgctttactttcttttaatttgaaattattgtccaaaattcacatttcacaagattacattagctttccttctgtcagggagagcatacatagaaagtgtagtgatttttttcaaaggcttttctagcctactctaagtacttgattccacttagggatatgcccaaggggccccgtcccattggattgagtgttagactgaagtttactagtcctcgttagtcttttgattt

SEQ ID NO: 721 - DNA, 280 bp, homo sapiens
  misc_feature (256)..(266): n=unknown
tagctattattactttttatacaagatttggaaatatctctctcattcagatattttaaatgtaatagcatttgatatgatatactcgcacctaataatctggtctccactaaggacttattgtaattaaaaagttaaacaagttagctgatggacaataaatctgttttaaggagggaagagaaaacaggcccttgtaaatattagctcttaagtgccagctactttatatgcaatatcatttgaaagatctccnaccatactanataaagaattgggg

SEQ ID NO: 722 - DNA, 388 bp, homo sapiens
  misc_feature (123)..(123): n=unknown
  misc_feature (276)..(305): n=unknown
caaaaggacaacagtctcttgggccaacatgacaccaaactctcaaactctggagaccctcagagacaaggaggaggagctgctgagttcaaacaagaacaatgaattcctcaagcccaagcnagaatgtgacaaggtgtcaacaaagccaaccaggaaggtgatgtatggcccataaatcacttcacaaaccagggctgcaaagaaagcacccagcaacccagagccccgagtgtgagttttttctactcctaaaccttcacaccccccacatcnaccctcctccagcacctcactnactgctnacctgtcactcctccactgaccaattggcctactcatggggtaagacaagttctgttcttctgtggcaaatactgggcatcta

SEQ ID NO: 723 - DNA, 458 bp, homo sapiens
  misc_feature (113)..(113): n=unknown
agaatgagctcatctctgcttcttcagctatttttagaatctgattttttttaaaagtggttggaggaaagaaatgaaactgcattcaactaaactgaacttggtcaccattntcatggggattggtgaggttttctctttgttgatgtcttcagttttcaacaaaattgcttctttggaagtttttgctttttctcctaaactggttatataggaatgtagtaggtacaggtcattccattatataaatctgtgtttataaatgatttacttagctgttccagcctgttagttaaatatgtatttaaggcctgttttttcaaaaaaaaaatgtatatatagaaaaaaaaatagaagctcacagaatggatactgagttgctgaaaattagtcatttgaatttaaatcttttcaggagtttttgcattaggatttacaccatatactcactctgaaac

SEQ ID NO: 724 - DNA, 404 bp, homo sapiens
  misc_feature (40)..(40): n=unknown
  misc_feature (258)..(382): n=unknown
gggaacgcacgaaggccgagagcatcgccagcctgctgancctggccatcaccacggagcacacgctccacgccacgctgggggtcgccgagttctttgagtttgtgcttaagaacccccacaacacacagcacacggtgactgtggagatcgacaaccccgagctcagcgtcatcgtggacagtcaggagtggagggacttcaagggtgctgctggcctgcacacaccggtgggaggaggacatgttccacctgcgnggcagcctggccccccagctctacctgcngcncccacgaggancgcccacgtccccttcaagttccagagcttctctgcagggcagctggccatggtgcaaggnctctcnngggttgagcaacnagaaggcatgggacgccgtgtc

SEQ ID NO: 725 - DNA, 393 bp, homo sapiens
  misc_feature (128)..(231): n=unknown
  misc_feature (347)..(362): n=unknown
tataataccagcataaaatattgcatagcaaataatagattatgtttgtacaaaatccagtaagaaaaacataattttctcatttaggatgattcataaaatacattttgagcaacagcgataacganggtcccacatgcgtanatggcagcaccagagccagacccaccaccacggagttcgcgctcacggaacccaggcctgctgggtgtcagcagcagctaagctggntgcaggtactacaaaatgaccagcgctcggtctctgcttcctcagccaagtgcacaggtcagccaggtgggcactgaagtgaaaggctgcagagaggcggggaggacagcctgcanggcangaggggcacngacaggccccagctgggttccgcaagaagga

SEQ ID NO: 726 - DNA, 323 bp, homo sapiens
  misc_feature (94)..(94): n=unknown
gttcaggcatcagtcctggtttcctggtgagctctctgctgactccacccagagctcccttgcttccgtctctgcagcagctacctccgttctnacacatggcttcttctgagttttcttatttcagccagtaccatggaactctcctgaccttgtgggctttgggcagaaataactccactccccacttctctcctaaattactggcaatggtgatactgagcatgcagggagaaacctgagctgttaatgctaggagcgtcaagctgttggtagtgaagccatcatcctctccaagttcccagatacttctttgtgaaaat

SEQ ID NO: 727 - DNA, 540 bp, homo sapiens
  misc_feature (534)..(534): n=unknown
gagtgaatggcccccttatggcccgaaagagttcagtgcggttgatttgttcccaaggtggggcacagacccaaggaggattcactccgggatttctcagcttccaggggttgctcggctgccttcatcttgcttccacctcttcaaccatcctggtattcactcatcccaaataacattggttttatacatttaaatttggaaatcaaagttaagccatggcgtagggtcagaattttttttacaagaggaaggaaaaagatccggtcccacaagaattcacaggaaatggctctgggtgagtgctgaatcccagtgagtgggaaaagaaaagtgatgcccggctgggaggaaacgctgagagcaaaaaggggtcccaccccagcccacgagtctacccacgacaggttggggacagactccttcacccagacaacgacgagagaccagatgccccacgaaacacacatttttaccagttgctgagatttctggctgttttcttttcttctttatatttttttctggatcggncaatat

SEQ ID NO: 728 - DNA, 505 bp, homo sapiens
  misc_feature (21)..(61): n=unknown
  misc_feature (328)..(350): n=unknown
gaatgaacacctaaatttgtnttttttcttccagtaaatatcttacaagtattatttaagnaaaacattttcttttacagattcacctttttggagttttgctggctattttaggaaacttggtgatcagtatttctctaaatattcaggtaagaaaaaagcttatttttctaacactatagattgatccagggacacattatgactctcatgggcattgggcacttttgtctttgtggctcttttctccataaaaattataaaaaatatatattttatgacctcattggtataaacacaaatataattcaggctggagtgcattcannnnnnnnnnnnnnnnnnnnnnnttaaaagaaattaattttgcaggatggagtggtctctgacagtattgtagacccctaggtaaggggccgacggtgtctaatggataaatagcccctgggtttgatttgcagtactttgatttctttccatagccctttaacccccagattgggga

SEQ ID NO: 729 - DNA, 340 bp, homo sapiens
  misc_feature (73)..(114): n=unknown
  misc_feature (268)..(268): n=unknown
gaattattgaaaattatattaggtcattttctagcaaagatttgtataaacaaatatagtagttaccccccgnnnnnnnnnnnnnnnnnnnnnnnnnnnnnnnnnnnnnnnnnngaaaatattagatggaaaattccagaaataaacatttcatacattttaaattgcatgcttttctgagtagcaggatgaaatctcttgctgtcctgcttggtatgtgaatcctccttttgtccaacgtatccatgctgcagatgctccctgtccnttggtcattcagtggccctctcggttatcagatcagctgttgcagtagcacagtgcttgtgttcaagtaacc

SEQ ID NO: 730 - DNA, 329 bp, homo sapiens
  misc_feature (7)..(9): n=unknown
  misc_feature (172)..(172): n=unknown
gcgagannnggcgccggggttcgctctgagtcgcgtggcaggccgcgctgcgtccaccgctgccgagttcagagctgcgcaccgcccgccgccgcaggtcgggttcccagcgctactcccaagacaccgctcagccatgaagatgcatttctgtatcccggtgtcccagcancggtccgacgcgctggggggccgctacgtgctgtactccgtgcacctggacgggttcctcttctgcagggtgcgctacagccagctgcacggttggaacgaacagctaaggcgggtctttggaaattgcctgccacccttcccaccaaagtactatc

SEQ ID NO: 731 - DNA, 291 bp, homo sapiens
  misc_feature (45)..(261): n=unknown
ccttgatgaatacagtccatgttaatgccaaaaaaatgggaagangtcaaatttcctccactgatggtaggtagcccacctgaatccccaagttctttcactgtcttganatagcctccaaggatattttaaaatatgagagctttcttcagagatcttcttcctttatgtncccaaaaacgcagtcatctttagctatcttaatcttgctttttcttgatagaaaactagaatagtctttctgcnggctttgttgaatgnggtattttttacctttgcgttgttccggaa

SEQ ID NO: 732 - DNA, 372 bp, homo sapiens
  misc_feature (139)..(213): n=unknown
  misc_feature (367)..(367): n=unknown
gattaagaatagataatctgattgctgttgttttgtttgtttggaaagaaaaaaaatgtctggcttcttctactatttgttttcactaccaaactgtgttactaaatttcttgtcatccttgtatgtaaaatgggtgcncnnggtggaggggtataanangagggagagtcagagagagtgtgtatgggnnnnnnnnnnnnnnnnnnnnnnnntacgcacacacactggggatagataagctacctggtaaagggtttgaacatttacaaaatgtcacactttttcttaaaagaaaaatattttggggtttgaataaaatggaccaccatttctcattggaacccattaattaagaaaaccagcatngtttg

SEQ ID NO: 733 - DNA, 220 bp, homo sapiens
  misc_feature (68)..(68): n=unknown
  misc_feature (193)..(220): n=unknown
aaataaaggaatcatctgccggcgcttcccaccttttgggtggggtctgttttctccttcagtggaangacattggggtcatcatcattactgctgaaatgttattactttagattttatcaaaaaacttggtgtcaccaggtcagaagggaaaaaaaaaatcaaacttttttctttttaccctcacacaccntccaacacagcacttccgnttccctnn

SEQ ID NO: 734 - DNA, 425 bp, homo sapiens
  misc_feature (122)..(213): n=unknown
gcagccaaagctgcgattcctttactgcccttgttggtaatgagtgccttggtggtaatgagcatctcatgtcagcacaagattttctctcccatttaaagtagaaaggggacttcagcttntcagtaaaaagcacagtaagattgaatgcaagcaaaagaatatgtaatggatttccatttttcctaataaagatnttgctcaagaagtttnaatctaatttaatttttctaataatttacaaggagataatagttccaaaatgtgaggggacataccaggtacagaaatgcaggaagccttgaaggttctatgacttcaactaatggaaaaacagatttagcctaaaaaatgctgttgtttttaaacaagtatgtttatgcaaactccaaacagtaagtatctttgtacccacaagtggatgt

SEQ ID NO: 735 - DNA, 449 bp, homo sapiens
ctcagagcagttaagccaagctgcctatgctctaataaaatacagtactataacaatagagaccagagagaaagaattttgctgtttaccttgtgcatcaccagctttaatggaccactaatactcagtcactgaagaggtgtgtgctctgttgcggggcagcataagctcgattcaacttacaatacctagatgaactgtggctcaaaacgacccacttcccttttcttccatgctcactaaagaacctgcagattgattgggggtctttagcaacttgaaaagggtggacttgaggaaaaactataaatacaatagtcactggaaattctgtgtagactcaactacacattagtaattagacacttaggtttagatttcatatgcatttagttcacaggtatcaatctttgaaaacctgcttgcttcttagtaatagcacagattat

SEQ ID NO: 736 - DNA, 528 bp, homo sapiens
  misc_feature (503)..(503): n=unknown
aatctgagaatattttagggcagtgatcctcaaggtctccaaatcagtagcatcagtatcgcctgggcaattcttagaaatgaaattctaaggtggtaaggcccagaaatgtgtggtaattagccctacaggtgtttctgatgatgtctgagaatcactgctttagagcttcttatatatggattaaccacagacagttacctgactgacctcctccataatctgtgctattactaagaagcaagcaggttttcaaagattgatacctgtgaactaaatgcatatgaaatctaaacctaagtgtctaattactaatgtgtagttgagtctacacagaatttccagtgactattgtatttatagtttttcctcaagtccacccttttcaagttgctaaagacccccaatcaatctgcaggttctttagtgagcatggaagaaaagggaagtgggtcgttttgagccacagttcatctaggtattggtaagttgaatcgagcttntgctgcccccgcaacagagcacaca

SEQ ID NO: 737 - DNA, 408 bp, homo sapiens
  misc_feature (348)..(348): n=unknown
gaaggacctgatagactgggttaacaagaataggtgtggtattgacaatgaacatgaagagtggattggtgatagggagattttgaattttggtatttaataggtttttccaagactagaagtgatccatttcatgtcagaatgatatttttatacttcagctcaatttctagagttttcccctttaacaggataataagccttcaacaaagaaccagatgaacagaaagtatactaaataagaaagacaactggttaacccacattgaaaaagtgaattgataataaaagttatatgataaaatgagataaaatgtttagctgtaaattcagcaaaactaaaacaanatgataatagtgctgagaagggtggatgaaacagttgctataatacgttactgatgttgg

SEQ ID NO: 738 - DNA, 531 bp, homo sapiens
catgcagtctctcttggagatgtagtaaaaataggatgaattcagtataaataggattgcttcaaatctcacagcagagatggactccggagctcctccctggagcagtttaattcaactaaagctaacgaggacatttctctgacccataccctctattctttcaacataagtgaacatgcctttgccaatagagtcgttttcctttctgcacaagcatcaccaaatatttattttgtggtaaaaatatcagtgatcttatttcatatctcaaaaccatcatctccactttaaagtaagaaatgccagtactaagaaatatttcatattgacaaaattgagtgaatcacagtagacaaatacataccttgttttaaacaatccaatataaaaaagaatacaacaattatttgtcttacacagaaggattctttgccttatggaaatatttgacacagagtacttttcaatatcaagctctccagtggcattggtttcaattattttttaaatgtaaagagtatgtttgat

SEQ ID NO: 739 - DNA, 359 bp, homo sapiens
ttcacttcccatctgccagattttgaattacttaccaaaattgcagaatctgatgttaatccatatttaggtacttaggtccatacttaggtcctgtcagaatctcatagccaactcataatcttgttagttaagccatcaatatcaaaatcttactgttacccttcagttattccagtttttccagttatgcaactaaagcctgctagttctccctttgaaatgttttctgtttgtgctagttttctatttttctattggtacatttcagcaaatttactaatctaaaaacaggacaaatttatctcagagttctaataggtcagaaaatgtgggctcaattggagttctgcgtgtag

SEQ ID NO: 740 - DNA, 291 bp, homo sapiens
  misc_feature (5)..(9): n=unknown
  misc_feature (122)..(256): n=unknown
ttgtnaganacatatttgagaaccggggtgaagatggtggcagggagaatggtcctttcacaaagatgtccataaactaatccttataaatcttgaaaatatgttacttgatatggcaaaanaaatttttcaggtataattaagannnnnnnnnnnnnnnnnnnnnnnnnnnnnnnnnnnnnnnnnnnnnnnnnnnnnnnnnnnnnnnnnnnnnnaactgaatagttttctggccagattcaagaagacggacgcnacagaggggaagaccagaaagaccaaaaacacaag

SEQ ID NO: 741 - DNA, 432 bp, homo sapiens
  misc_feature (145)..(195): n=unknown
  misc_feature (371)..(388): n=unknown
aaaaatataataagccaggacctaaagataagaagtcacttcttttgaccagagaagtggacaaaagttagtctaaagtagagataattacctctagagctttctggtcaccatcacaactgattgaggctaaaagtaaataggnnnnnnnnnnnnnnnnnnnnnnnnnnnnnnnnnnnnnnnnnnnnnnnnnnnacaggcaactgtgctgcacagttggagcgctactattgttttatgtaccacattggaaatcagtgtcatgggatgcctaccccttttattgtatttttttctttttaatttcttaatctaattgaacaaatacacaagtatctgcaattgtattgttgtaatggttaaaataaaantacatggtttttattcntttattgtccaataccaaaatcttacttaggacattagtatgct

SEQ ID NO: 742 - DNA, 401 bp, homo sapiens
  misc_feature (370)..(370): n=unknown
agtggcatagtgtgaatttaaggagtgagtcgtttgggatcacgagggaacatggaggtctgacgaacattatgcaatcccagaaacagcatagtaactcgttccaatccaatgcctccaccagcatgaggaggggctccaaagcggaaggaatcaatgtaagccttaattttctccaaatcaattccatgatgtaaagctctctctgttagcagttgaggatcatgtattctttgagctcctgacaatatttcttctcctctcatgaacatatcgtaagagttggactgtttgggatttcttgggtcaggcatggtatagaaaggtcttacagccaatggatatttatcaagaatataaaaatctgtancatactttcctttaccaaatgacccaacagc

SEQ ID NO: 743 - DNA, 343 bp, homo sapiens
  misc_feature (268)..(268): n=unknown
ttatactttcccttgaagggatgtgtgtgagcggcagatagtgtgcagtattcgaaaacacctgtcttcccttccctttcctatttttcccattttccctacttctttgccagttttctttctgtttaacccccttgattaccccccaacttttaatttcttctcttcctccctccctcccttctgactatattggttattgggcactgggagaatactacaataatgtagataaagcccttgccctcaaaaagaatgtcttgcagangggaggtgggacagggaagcagtcagttttactgtagtgtgctaattcagtgtgacatgatggggcgggggtggc

SEQ ID NO: 744 - DNA, 346 bp, homo sapiens
  misc_feature (6)..(339): n=unknown
cttctngnctnaattngtaatttanctcaataacgtatctcatggcatcctaacaaattcagaacattgtccccactaatggggctttgncaacagntgtaccaanaaaagcaaangcctccgcccttcanactcnagctggactgaatgatcatctcctaggcttcttgcacgctantctctctgcctaanangctttcctcagnctnncttnagtacctgttnaattctggcctntgtaagcacttgatttagatgtcaccccctgttgaagccttgggaagatnnccccatggccctctgccacccccgcnccatnatgtcacactgaattagcanactacag

SEQ ID NO: 745 - DNA, 214 bp, homo sapiens
gccagctaatactgctgttggtatagacatggaacaactgaacacttaggcgttgcagatgctaatgtaagtaggtacattcactttgggaaataatttcacattattaaagttgaagatacacataacactatgacccagtattcctatgtcttagagaaatctctatacagacataccaggtaatgtatgtagttgtttatacagtactgat

SEQ ID NO: 746 - DNA, 189 bp, homo sapiens
tacattacctggtatgtctgtatagagatttctctaagacataggaatactgggtcatagtgttatgtgtatcttcaactttaataatgtgaaattatttcccaaagtgaatgtacctacttacattagcatctgcaacgcctaagtgttcagttgttccatgtctataccaacagcagtattagctgg

SEQ ID NO: 747 - DNA, 454 bp, homo sapiens
  misc_feature (8)..(93): n=unknown
  misc_feature (395)..(452): n=unknown
ctggaggntacgtcacgttatcgtattaatttagaagatgagacacaggatttaaagaagaaattaggtcaaatcagaaatcaattgcaagangcacaggatcgacatacagaagctgtcagatgtgctgagaagatgcaagatcacaagcaaaagcttgaaaaagataatgccaagttaaaagttacagtcaaaaagcaaatggacaaaattgaggagcttcagaaaaacctgttaaatgcaaatttgtctgaagatgaaaaggaacaattaaagaaacttatggaattaaaacagtcactggaatgtaatttggatcaagaaatgaagaaaaatgttgaattagaaagagagataactggatttaagaacctcttaaaaatgacaagaaagangttaaatgaatatgaaaatggaggatttagtttccatggnggtttnaaaactagtcnat

SEQ ID NO: 748 - DNA, 267 bp, homo sapiens
  misc_feature (80)..(80): n=unknown
cacataaacagctcagtaataaaatcttatctttcagatcatataatttttctttaaaacctgtacatattctcttgatnctttccaaactagatcttgatttagatttgactcatcagtagaccctagaggggaagctattgatccagattccaattcagcagcagcttctttgagttctctagttatatttttttccaactcctgctgcatcttgctcaagtagttctccatgctattatttgaagcccgcggattgaggcagag

SEQ ID NO: 749 - DNA, 398 bp, homo sapiens
aaaaagcttcctgagatgataagaccacagagtgccatatcaagctttagagtgagatcccctggtcccaaaccacaagggctactggcacagttatgtaaaaggcagactgactcttctagctctgatatgcaagcctgttctcaagacaaagccaaaatatctcttggttccagcatagattcagtcagtgaagggcctcttcttagtgaggggagtctctctgaagaagagggagaccaggatggacagccccttttgaaagtagcagaaattttaaaagaaaaggaattttgtcctggagaaagaaatagttatgaacccatcaaagagtttcagaaagaagctgaaaaattcttgccactttttgggcacataggtggtacacaaagcaaagg

SEQ ID NO: 750 - DNA, 465 bp, homo sapiens
ctgggctcctgatgaatgctgggaggtaacatccacagaggaaggatcataggcagactttctgttagaatggtcctcctgagggcttaaagtgctatgaggttcaagagttgattttttttctgtcgaagtcccagtccctggagaggagacaaaatcatcttcatatgaaacaccacttagaggagttgcggtggcattcaaaggccgtgatgttgatgttcctctgtccaacttgtcttcaaacccttttccatataactgataggattttgtaaaaatattaatgacgctatgtggacttccctttgccaattcttcccatggtcctttgctttgtgtaccacctatgtgcccaaaaagtggcaagaatttttcagcttctttctgaaactctttgatgggttcataactatttctttctccaggacaaaattcccttttctttaaaatttctgctaactt

SEQ ID NO: 751 - DNA, 497 bp, homo sapiens
  misc_feature (426)..(426): n=unknown
gaagaatgagaccatctgggcaggcctcggtcatattattttggatgcggccaacccagcagatggcagggcctgtgttcccagggtgacgaggggcccagggagccatccacactccggcaggcacatgggctccctcctgctggcacccagagacccggacccgcaggcctgcctggttcctggaagtcttcccagtcttcccagccagcccgggccctggggagccctgggcacagcagcggccgaggggatgtcctgctccaatacccgcactgctctggagtttgccctctttcccaaggagatgctgctggggagctgagtatcctgttccgcctcctgccacctggacctccctcagtggatgtcttccctcccccgaccccagcctgtcagtccgagcacagtgcagtggggcctgtnctcactggtgctccaggggaagaaacgacagcctcacttctgtatggactgctgatgtggcctgcatcctg

SEQ ID NO: 752 - DNA, 110 bp, homo sapiens
  misc_feature (22)..(98): n=unknown
tcgggggagggaacacatccantgaggnnggtccangtggcangaggcggaacangntactcanctccncagcagcntctccttgggaaanagggcnnactccagagcag

SEQ ID NO: 753 - DNA, 422 bp, homo sapiens
  misc_feature (314)..(314): n=unknown
ctggcatcctgcagacagggagacagtgcaatcatgatggagcagtccttggcagtcatggcgacgcggtactgctgcacctgcaggggcgggaaagatcagctccaggtcacacaggaagcctctgcccccccacacaaccttccttcccagtagccaagtgtgggaactgcttcctgcctcagaacctgagggtgggattaggagcgagggccacggtgagcacgggcgtcaggaggtcgccctgtgagagcacctgggccagccctcagtgccacggggctgctcagaggccagcaccgccccctgacctntcacggcaagcagtgtgggaccccgactccagaccctgagacggatgatctgtcttcagcaaggtcaccacagtcggcctttggaaggaaaagcagtaagccacctga

SEQ ID NO: 754 - DNA, 128 bp, homo sapiens
  misc_feature (26)..(126): n=unknown
atctaaaactatgcaaaccatatatnnaagtcnaaagaaggnagagganacagtgcatcanattctgcnctgtagangaganagttgngagcattgtggtgcctgnacttcacntttctccctggncg

SEQ ID NO: 755 - DNA, 138 bp, homo sapiens
ggtcagttatggaaacacatcaaagtactctagaaccaaaagttaatttttgaaagaaattaacttaatgtacagattttataggaattctggacgtatttaatatcgtgatgctagaagaatgtcttaccaattaat

SEQ ID NO: 756 - DNA, 506 bp, homo sapiens
ctgagcataatgtattggatttctgggaattaaaggcaatgttatttgacaaagttctaattaactggttgtacagttaaaatttttttcttcaaattttctcatcagataacctctcaaatattttctcatcaaataacttcttagaaatggaggttttattttaaaaaagacagtgttacatttaatgctaggattgaaatcttcctaaagtgggagaataaataataatgatgtatttctctgaatgctttattgattccactacaatttgtccatgtgttaccatgtgttaccatacttggtatattatttcatatccagagtccattcagtcttataagagcttattaaatacatactaatacatatcaaattataaatgaatcagtgggcattctacattttacatcgtatatatgtacatatatatctacatataaatgctcaagcatttagttgttaagtgaacgctttcattggcagaaaacttacttgatgttaat

SEQ ID NO: 757 - DNA, 465 bp, homo sapiens
  misc_feature (346)..(439): n=unknown
  misc_feature (567)..(567): n=unknown
gtgcctatgaaggggactgcccatgaagtgaaagtcaagtgtgtgtctgctgcggcagccacggaggccaaggacctcacgggagtaaaagatgacgagactggcttcgggagaaacaccatccagaagagacctttcaaaaaacttctagagactccccaagacgtatgagatgaaaggcttcttctgtctgtagaattacatcaaaataggactgatgcagttgggacagctcgtttgaacagaaaacagattccaaatgatctgaaaaaaaggattgcaaaggggacgactgtagccagattctgtggtgaacttatggcactgaaatggtgtgacggcaagnaggtgacaatgttgtnaacattcnacattgttactgtgattgangaaaccattagaaatggaaagaaaactaaaaggccacgtgtcattgtggattataacgagaatatgggagcagtg

SEQ ID NO: 758 - DNA, 569 bp, homo sapiens
  misc_feature (439)..(439): n=unknown
  misc_feature (567)..(567): n=unknown
cacattcggcacaaaaatagcgcgtttctttccggatcttcttgccatccttgtcgtattgggagcagcaaattttgcagcgaccagttggattctgtttcccggacgttgctggtatgctcttggggaaatgtcttccagacagacgaagaggtgtgacatcatcggagcaaggacgacctcgaagatgttgctgccctggcttgtgatgcttttccagcattctttcaatcaatgccagtctgaagtttatatggctcatcgtgtgctcaggattatccttcttgaacaggatgtaggagttcagcactgtaatgtgtagaagatggtgaaagaatttcttataccaaaccttgtgtcttttgcgctcagatggataagaagtaagcatttgatcagccgagtccactgctcccatattctcgttataatccacaangacacgtggccttttagttttctttccatttctattgtttacttcaatcacagtatcattgtggaatgttgacaacattgtcacctccttgccgtcacaccatttcagtgccataagttcaccacagnat

SEQ ID NO: 759 - DNA, 435 bp, homo sapiens
  misc_feature (91)..(91): n=unknown
  misc_feature (337)..(337): n=unknown
gtctgggagcaggtggggggcagagcagggagctgagccctctactctgtttacagcacgtggtcctcactgatctttctgggtgggaggnggcttgtgcggctacaccctgggcaggccagccccgcccccgggtttattgccccaggctgctactggcacaagccacagaccagcagtcccagcccagggaagctcggaagatgcctaggagggcctcaaggctcatccacaacatggacctgcgcacaatgacacagtcgctggtgactctggcggaggacaacatagccttcttctcgagccagggtcctggggaaacggcccagcggctgtnaggcgtttttgccggtgtacgggaacaggcgctggggctggagccggccctgggccgcctgctgggtgtggcgcacctctttgacctggacccagaga

SEQ ID NO: 760 - DNA, 325 bp, homo sapiens
  misc_feature (35)..(35): n=unknown
  misc_feature (287)..(287): n=unknown
attttttcatcatgttattcattcatacaataacncataattgtgtgttttttgcatgtcactagcttagttgtgaaataattcctacttcttcccctcatagaatgaaagagattcatgagtaggtaataatagcatattcttataattgaaatgatagaattattatgtgagtgcttaacctagcttaattatgcagagaaggcttgctggaggaggtggcaccagaaatgtgtatttgaggatttgatcagcaaatggaacattctcagcagagggaaaatgancacaaagatagggaagtgagaaatttaatggcatgatt

SEQ ID NO: 761 - DNA, 447 bp, homo sapiens
  misc_feature (144)..(318): n=unknown
atgggaccattctccatcttatagcctctatttctgttggttgcgtcaatatcacctaagccctcaagtagaaagcttacaaatctcaattcttctttcttcatagtctacatctccaacttactactagcacctctagctatnnnnnnnnnnnnnnnnnnnnnnnnnnnnnnnnnnnnnnnnnnnnnnnnnnnnnnnnnnnnnnnnnnnnnnnnnnnnnnnnnnnnntctctgctctgcagtcatcatgaatcacttcttaacaagaagctctgcatttnnnnnnnnnnnnnnnnnnnnnnnnnnnnnnnnnnnnnntctcccatgtccttcatcctctgtaaaatatgtgttagcctctaatcatgccattaaatttctcacttccctatctttgtgttcattttccctctgctgagaatgttccatttgctgatcaaatcctca

SEQ ID NO: 762 - DNA, 507 bp, homo sapiens
  misc_feature (30)..(48): n=unknown
attataggtttggtcaagaccatgccaggncaaaccttatttggaatntcaaaacacgagaagaactgaaagatactcttgaatctgaaatgagagcatttaatattgacagagaacttggaagtgcaaatgtgatctcctggaaccaccatgagtttgaggttaaatatgagtgcctggcagaggaaattaaaataggagactattacctgagattactattggaggaagatgagaatgaagaaagtggatcaattaagagatcgtatgaatttttcaatgagctttatcatcgcttcttgctcaccccaaaagtaaacatgaagtgtttatgtttacaagcccttgctattgtttatggcagatgtcacgaagaaataggaccttttacagataccagatatatcattggaatgttagagaggtgcacagataaacttgaacgagataggttgattctcttccttaacaagttgatccttaataagaaaaatgttaagggatctc

SEQ ID NO: 763 - DNA, 458 bp, homo sapiens
  misc_feature (433)..(454): n=unknown
agctcggcttacatggagatgtgcaagggtaagcaagtccacaaggattcttattccatttgaatccatgagatccttaacatttttcttattaaggatcaacttgttaaggaagagaatcaacctatctcgttcaagtttatctgtgcacctctctaacattccaatgatatatctggtatctgtaaaaggtcctatttcttcgtgacatctgccataaacaatagcaagggcttgtaaacataaacacttcatgtttacttttggggtgagcaagaagcgatgataaagctcattgaaaaattcatacgatctcttaattgatccactttcttcattctcatcttcctccaatagtaatctcaggtaatagtctcctattttaatttcctctgccaggcactcatatttaacctcaaactcatggtggctncaggagatcacatttgcactncaag

SEQ ID NO: 764 - DNA, 462 bp, homo sapiens
  misc_feature (178)..(178): n=unknown
  misc_feature (413)..(413): n=unknown
gtgaagcccgcggaggagagacttggcccggaggcgggagctgggccggggccggggaagccaggcagcggagtttcgtgagtgctcgcagctcatacctgtggctgtgtatccgtggccacagctggttggcgtcgccttgaaatcccaggccgtgaggagttagcgagccctgctnacactcggcgctctggttttcggtgggtgtgccctgcacctgcctcttcccccattctcattaataaaggtatccatggagaacactgaaaactcagtggattcaaaatccattaaaaatttggaaccaaagatcatacatggaagcgaatcaatggactctggaatatccctggacaacagttataaaatggattatcctgagatgggtttatgtataataattaataataagnattttcataaaagcactggaatgacatctcggtctggtacagatgtcga

SEQ ID NO: 765 - DNA, 490 bp, homo sapiens
  misc_feature (444)..(444): n=unknown
gaacagctcgtggctcttccaggacctggggctccatcttgcagaacagctcgtggctcttccaggacctggggctccatcttgcagaacagctcgtggctcttcaggacctggggctccatcttgcagaacagctcgtggctcttccaggacctggggctccatcttgctgaggggtgctttcttgagactccttagggacgattctgattttccctggagctgtacaatggcggtttatctttcaaggtcccctgggcctgggctccgaggcagccactttccctggagcccgtgaaggaggtttggacgccagctgggctgcctgcctgtggcggggcaggaatgagagctggtgcggctggggcccctgggtgcctggtcctgctctcatgacgcccaacccttgaacctgacatgggggcccaaggattctccccgcangctcggcagactcacctgatcaccgggcaagcgcggggcggggctg

SEQ ID NO: 766 - DNA, 244 bp, homo sapiens
  misc_feature (4)..(239): n=unknown
aatnaagnaacaatcctcctccanncaaagtncncaacgcattccagancatcancatnaaacaagtcnanaaacagcattnggacnggnntaacaccaaatgctgncntagaangnnctangncacacncngaccntgtactctagcactttcctctacctccccagctgggcactgncctattttacattctcaggctgagggtgagcaacctncagctggggagccagngcgggtngtagg

SEQ ID NO: 767 - DNA, 173 bp, homo sapiens
  misc_feature (31)..(31): n=unknown
  misc_feature (149)..(152): n=unknown
gtggatgggtgcagttcaggagatagctgtnctccagcctttttggagggatgcagagcctttccttaggacaaacaagcatttcaaaaggtttgaactacctaaccattatggcaccaggaaacctctggcatatgagaaataacttnttntttggttcaagatgttggatg

SEQ ID NO: 768 - DNA, 401 bp, homo sapiens
attattttaaaaaaatcagtgtggacttccattcctctttcttttgattcccccctttgacttttcatgtatctctcctgccttccttccccagagtggaggagttagacttgcctcgtgggatgagaggagttgtggctttgtgtctgctggcaccaagagggctgagggtgaggtgtggaagggacagggggaggagatgggcagcattgttgagagattggtaacactgagcaaataaatatgttgagaatgatgacagcaagatttctccattagagaaggtatttataaaaataggaatgaggagagctagaaacctggagtgtggcattagaatagaactcatatcttttaaatatataggaacaaataaataaattgttgtgtgtgcacatatg

SEQ ID NO: 769 - DNA, 359 bp, homo sapiens
atttaaaagatatgagttctattctaatgccacactccaggtttctagctctcctcattcctatttttataaataccttctctaatggagaaatcttgctgtcatcattctcaacatatttatttgctcagtgttaccaatctctcaacaatgctgcccatctcctccccctgtcccttccacacctcaccctcagccctcttggtgccagcagacacaaagccacaactcctctcatcccacgaggcaagtctaactcctccactctggggaaggaaggcaggagagatacatgaaaagtcaaaggggggaatcaaaagaaagaggaatggaagtccacactgatttttttaaaataa

SEQ ID NO: 770 - DNA, 518 bp, homo sapiens
gaatttttgcttggcagaaggctggatttttcttgatgttgttatgctagtgtacaagtagcagtatgggccagattaaaaacgggttgaattaccacatctgacatgtgctgatcagttttatccattaagggagttggtgcttggtatgctctaagactgtctatatttcaatctgtctggtcctcttctttttttcaatggttcgaatgaaaatatgggtagcatgtttatctgatgtgtggctagcattcattgtaaatcaaaaattgcctgtggtgcaataaatatggcagtaaataaagacagacatggcccctatcatacctttagagctatcaaatgaggtaacagaattaggagctaaaatgacctcagcaggttataataatgtaattaaatttaatagggataaataactagtcctgcatttgggcaaagatctggcttagcaacaaaacctttgaaaaagacttaggattttagttgataacacgctcaatatctgtccaacagtg

SEQ ID NO: 771 - DNA, 565 bp, homo sapiens
  misc_feature (355)..(377): n=unknown
aggagatatgattacctcttcttccctttgtatacaaatatgcaaactagggcaggcaacaatcttctaatttcttctctggtgtgagaattataaccaccccaaacattggaaaacattagcaacaattcagtcactcattaagtctgcaaatattaaatatttcatagttacacagtcttgccaaaccaactctcaaatcaagaaagagtgaaaaaacactttaaacattttactataaatgctgttctttaaccataatgtcttttatcatttttttcaaaataaatttgtaatgagcttttttgcaaaaatttttatcaaaaataattaagtttgtctagtttacctaaannnnnnnnnnnnnnnnnnnnnnnacatgtagacagagagattgcagtaccctgaagttacagataaaaacctgtcccttaccatcccttaaaccttagaaaaatatatggctttggggacaatgttaataatatttatataacgaagaaaaatatgcttagataataaaagtcataggacagaaaggcatctgaaaagaaattttttacaa

SEQ ID NO: 772 - DNA, 467 bp, homo sapiens
  misc_feature (294)..(408): n=unknown
ccacaatgtgggagataggggataagttcagatggggaggtatagtatttgaggcagcgctgattcatgtgagttcaacactgatggctctttgaggaaggggttacttggcatgagaactcaagggttagatggctctgagggtgcacgttgggaatcattcagtcaagaaatgctttcccgagtggctgctgcaaaccaggcataggatattttcagtccacttcggggactcaaaagtgtagaacagagtagtagaaacaacatagagaaccctaaaggctgaagttgtgnnnnnnnnnnnnnnnnnnnnnnnnnnnnnnnnnnnnnnnnnnnnnnnnnnnnnnnnnnnnnnnnnnnnnnnnnnnnnnnnnnnnnnnnnnnnnnnnnnnnnnnnnnnnnnnnnnncactgagtttttatacttttgttcatttgtctatttgtatagaagatcacattttttta

SEQ ID NO: 773 - DNA, 423 bp, homo sapiens
  misc_feature (129)..(406): n=unknown
tcactggatcgcaaatccagtcagttcattcactccccttctcagttttatggctccccaaatcagggcctcaggctacctatgtcattggctaatgcactgacagagtgtctaatagaacagagctgnngncagantctagggcngccccacatanaaatnaacacacttagcattcnnactataacagtcattcaaggagcaataaacacactaaccccctcccctacagaccacttctcttggnaaaaagaacaactcctgggcccttgttgaaacccagataacagtggtctttaaaaaaatgtgattcttctatacaaatagacagttgaacaanagtataaaaactcagtgtcaacaaatggtgctagaacaacgggacntccatacccaaaatantggntttcaacccataacatt

SEQ ID NO: 774 - DNA, 364 bp, homo sapiens
  misc_feature (332)..(332): n=unknown
ctctaaacgctgagcttttttcagactattttaattcctgccccgttattactataccaggtcgtacatttcctgttgatcaattttttttggaagatgcaattgctgtgacaaggtatgtattacaggatgggagcccatatatgcggtccatgaaacagatttcaaaggaaaagcttaaagcaaggcggaacagaactgcatttgaagaagtggaagaagacctaaggctctcccttcacctccaggatcaggattctgtcaaagatgcagtgccagatcaacagttagattttaagcagctcctggcccgctataaaggggttagcaantcagtcatcaaaacaatgtccatcatggattt

SEQ ID NO: 775 - DNA, 242 bp, homo sapiens
  misc_feature (18)..(234): n=unknown
caagtttactcagtagcnaatagcctaaaatgaaattttaattttgcttgttcacataattttngntttttnttccccttctctgttctganttctctcagtcgagccttggcgaccaggnaaagaaaaaaaaaaggcgnatttctnttcatgcccctctcaccccantaaaaagtaggagaaaaagaanacacnnattaaaacanantngtatnatanatncactttngannnatcaggtg

SEQ ID NO: 776 - DNA, 453 bp, homo sapiens
  misc_feature (369)..(369): n=unknown
gcgctggggaaaggccacgtcgctatgagtgtgtttcagtctacctggattaaacgtttgcttctcttcgtctaccttgattaaacgtgcacttcgcagtcctcggttctccatacccgtgacctggggatcgctacggaccttaaaatacccgcaacagccccttcgtcccaagtaagtaggagaattgcttccctttcggtttaaaatctctctgaggccgttccttgctctctgcctttcttccttaggaccatgtagacaaccccattcaggtagtgttcccgcttaaaaccctctgcttgggccccgcgccaagtcgagtcctcattcgggatgtggactagcgcccttcgcgatccccgagcncctccgtcgtctgcccctggaggggagcgcccactgtccggctcctgaaggaagcgcttcttcctcccacgtcctggggattct

SEQ ID NO: 777 - DNA, 100 bp, homo sapiens
  misc_feature (8)..(86): n=unknown
gttctgcncaatgctctgcaacttacttcacctctngtagctctttctcnngantntttccgntantntccaatctaaaanccannatgcctcttttccc

SEQ ID NO: 778 - DNA, 508 bp, homo sapiens
  misc_feature (341)..(422): n=unknown
ctaaagtgcatatgggtgcatgtttttcaaaagtttataatgggtgtcccttgaaaattcactgtgcatcatcatggataaacccagatactagagatcagtacttgatatttggtgccgaagaagggatttataccctcaatcttaatgaacttcatgaaacatcaatggaacagctattccctcgaaggtgtacatggttgtatgtaatgaacaattgcttgctatcaatatctggtaaagcttctcagctttattcccataatttaccagggctttttgattatgcaagacaaatgcaaaagttacctgttgctattccagcacacaaactccctganagaatactgccaaggaaattttctgtatcagcaaaaatccctgaaaccaaatggtgccagaagtgttgtgttgtaagaaatccttacacggggccataaatacctatgtggagcacttcagactagcattgttcattagaatgggttgaaccaatgcagaaatttat

SEQ ID NO: 779 - DNA, 564 bp, homo sapiens
gaacatattttaaaaccattaccattaaaataaatgaagatcataaatcacaatttagtttgttcttagtgtatatactcacattaaaatataaagaacatataccaaaaagagccaaaagtgtgcattttgctaaaacctggtatatacatattccattggaaaaaagcaatcaaaaatgacttaaaccaaaactaagttcctgtgatgtgtagtaaccatatattgtttgtatgagtgtagtaactaaattattttggccatgtattaatactctaagtcaaaagaaatatgaaaaggatcataaaataaggccaacaaaagtaaaaattccaagagaaatttgaaccacttcactctatggaatgttacagttcttcagtgtgatcatatgaaatgtttagtgaggactctttaataatgctaattaattctttgtgcatactgtaattctgaccacaattgcagtattctatcatggtaccgctattctgtgattcaaaaatgttcaaaggtattgtttttaagcaaagacaagcaatcttacaggattctgcttaaata

SEQ ID NO: 780 - DNA, 460 bp, homo sapiens
  misc_feature (369)..(422): n=unknown
catggatgaaagtgccttcccattatgctgtaccctgggcagagtggacagtgacgaccctggttcgagcccagggtgcgcttcgggaccgcttgcggttaccagaaagtgaacaaatggtccatgagcggaaggtgaggcacctgaggcagagaaagtaaagaaacgcgccgccgagaagcagtgcctgggtccctcacggaggaaattgtcttctccttagcccgttcgcttggcagtgaggtccctggcgtccctggtttgatcccagggtacgcctcgggccactagtgttaccccaaggtgggcagaaagcccataaggggaaggcgaggcacctggggcagagaaaaaaaaaaacttcgccgnaganaagcgcggcctgattccccanggacgaaagtgtnttcccatnagtcccngcactgggacccggggaccctggtgtccctggttcgag

SEQ ID NO: 781 - DNA, 463 bp, homo sapiens
  misc_feature (259)..(259): n=unknown
ctttccctcatgggctttgtgctcccaaagctccccttggggtgcacgtagcggctgaggcacaccctgagctcgaaccagggacaccagggtccccgggtcccagtgcagggactgatgggaagacactttcgtccgtggggaatcaggccgcgcttctctgcggcgaagtttttttttttctctgccccaggtgcctcgccttccccttatgggctttctgcccaccttggggtaacactagtggcccgaggcgtancctgggatcaaaccagggacgccagggacctcactgccaagcgaacgggctaaggagaagacaatttcctccgtgagggacccaggcactgcttctcggcggcgcgtttctttactttctctgcctcaggtgcctcaccttccgctcatggaccatttgttcactttctggtaaccgcaagcggtcccgaagcgcaccctgggc

SEQ ID NO: 782 - DNA, 219 bp, homo sapiens
  misc_feature (130)..(177): n=unknown
gttaagcagggtttttaaaacatggtgttaatgtacataatgcagccattctcaaaagtatgacatggggagacccctggaggttttctgagacccttttaaggagtctgccgagtcaaaactatttttntgatactagtaaaacatttgcttttttcattctgtctctcacaagtntagagtggaattttccagaggttacatgatgtgtgatatcac

SEQ ID NO: 783 - DNA, 171 bp, homo sapiens
  misc_feature (28)..(88): n=unknown
aagatttcgaagaagcatatcaaaattnttccacccattccttcacagtataataggngaaaacatctatcctccgttgacacctggnagaatgagattccaactcactccagggcatggccagaaaaattcaacaaaaggttttgctaaatcctctgcactattatctag

SEQ ID NO: 784 - DNA, 148 bp, homo sapiens
  misc_feature (118)..(118): n=unknown
cagacctcccccttctttttgtcaacttgctgggagctttgctttattggttggcagtgacctaagaacaggatatggtgaggatgtcatggaagagaagagctctttccgtggtatnctttggcaagagccatgtctactaagaggt

SEQ ID NO: 785 - DNA, 145 bp, homo sapiens
  misc_feature (59)..(59): n=unknown
caggaacgctgtagcttcctatctcaaaaaaagagagggtccaagatactataactttnggggcatccccccatgcacatacatggaagggcggcacaagcattcttcgatgctatcaaacatagtgaagaaacagatgctgtga

SEQ ID NO: 786 - DNA, 223 bp, homo sapiens
  misc_feature (19)..(216): n=unknown
ctagagcctgcaggcagtnggggtgtgggacttnacacacatagagatcaggagagctgtaaagactcacnntgatggctcatgtgggtggtgactnacccgtgtnagagggtgctgctggcaggcagagctggcagaggnagataggnttgagggtctcaccttttggtatacccacacatnntttacagggagnttcatgccaggacattnctncatgcct

SEQ ID NO: 787 - DNA, 270 bp, homo sapiens
  misc_feature (66)..(260): n=unknown
catccagggtctaacatctaacaaatagtggctttagaaatatataccagagaaaagtgaagagangacagtatctaaggngtaatataagaaatatttccaaaactaaaggaatttctatataaaaagtttctttttcagaacactggggnaaaagagacaattttaaaatgttgcagggaggngnaaaattaggttccatgcaaagaaaataggngtcagatggtattgngattttcagtagcaacaactgnttnccncaaatacagt

SEQ ID NO: 788 - DNA, 393 bp, homo sapiens
gaggaatcggagtagaatgcgtcagttggacacaaatgtagagcgaagagcccttggagagattcagaatgtgggcgaaggtgccaccgccacacaaggcgcttggcagtcctcggagtcctcacaggcaaacctgggggagcaggcccagagtgggccccagggaggaaggtctcaacgtagggagaggcataaccgaatggaaagagatagaaggcgcagaatccgcatttgctgtgatgagttgaatctcttagtgccgttctgcaatgccgagactgacaaggccacaactctgcagtggaccacagcattcctgaaatacatccaggaaagacatggagattctcttaaaaaggaatttgagagcgtattttgcggtaaaactggccg

SEQ ID NO: 789 - DNA, 565 bp, homo sapiens
  misc_feature (16)..(541): n=unknown
tcccatacaaaggtcnagtctgangttttgtntacaaactcaaatcnccaantaanantanttattnagggtgactttntattncactancgtctattgctattacctgtngtnattgataagtaaanccactcattganaaacccaattccaaacaccacagtttgnnanacatgaagtaatgaatgactctnggtatgnaaacntggcntttaagcgtctactgtnanagtatttcatttgnggncaaaagtagntttaaagcaagtatctngaaaatttttagcacacaggtttaaaatgntcctgcacgttgcnatacagcngcacgtnactcanagtnatgacnagggggtntgatataacnaatgaaataaaatttccaaactgtntttagttnacaatttaacttgtnccaattgctaaaggggcatntttaaaaggtaantaantananagccgtgtncnntttnagcttaaanacagtacanagngntgtcaattttttaagttatcatgttaagataacatgatggccncngagcattgctaaaatgctactaat

SEQ ID NO: 790 - DNA, 509 bp, homo sapiens
  misc_feature (43)..(118): n=unknown
  misc_feature (225)..(225): n=unknown
  misc_feature (366)..(380): n=unknown
cagacatcgactacatggagcggcagctggacttcaccctcancnccaagtntgcngggtttncagctctgatcaatcgcatganggctgatgggatgcnggtnatcctcattctggntccagccatttctggcaatgagacacagccttatcctgccttcactcggggcgtggaggatgacgtcttcatcaaatacccaaatgatggagacattgtctgggganaggtctggcctgattttcctgatgttgttgtgaatgggtctctagactgggacagccaagtggagctatatcgagcttatgtggccttcccagactttttccgtaattcaactgccaagtggtggaagagggaaatagaannnctatacaacanntccacagaatccagagaggagcttgaagtttgatggcatgtggattgatatgaatgaaccatcaagcttcgtgaatggggcagtttctccaggctgcagggacgcctctctgaaccacctcctacatgc

SEQ ID NO: 791 - DNA, 333 bp, homo sapiens
  misc_feature (29)..(332): n=unknown
atatttttatgtgaaatgtggttgtatanattagaaataagatttacacatttcaaagcacactactgcaaaaatanattatttttanccnccnnactctcnttnnagctttgcctgctcagatctcaatctcaccagtagccctttatgctnnggntttctcaagaccctcttcttcnngngagtngactcttcctttttcctccccatnnngctgcngacaattttncattaggttcttacttaggatcactnttacnatcatcttcngttncatcngatcttnccttntgtttgccnntncnttgctnancangcnnncnccaactagna

SEQ ID NO: 792 - DNA, 475 bp, homo sapiens
cagtttgtggtgtcaaagctgacaatgtgaaactaatgcatctatctttgatacaacaagggacggttgatggtatcgtggtggtggagtctggtcacatgactctagaaaactgcatattaaaatgtgaaggaacaggagtgtgtgttcttacaggggctgctttgacaattacagacagtgaaataactggcgcccagggtgctggtgttgaactgtatcctggaagcatagctattttggaaagaaatgaaattcatcactgtaataacctcagaaccagtaacagttcaaaaagcaccttaggtggagttaatatgaaggttcttccagcacccaaattgaagatgactaataatcatatttatagcaacaaaggctatggagtaagcattcttcaaccaatggaacagttttttatcgtagcagaagaagctctcaacaaaagggcttcttcaggagataaaaaagatga

SEQ ID NO: 793 - DNA, 559 bp, homo sapiens
actaccatttcagtggggtatgagaatcatgtattaaacaaatttgtgaaatataaaactttaacatcaattcagacgctttaacttgtgactattctgatatcccccttgacgtttgcttctatcttattattattcatttccagattcagattttgcattactttgaagagcattttatcatcttttttatctcctgaagaagcccttttgttgagagcttcttctgctacgataaaaaactgttccattggttgaagaatgcttactccatagcctttgttgctataaatatgattattagtcatcttcaatttgggtgctggaagaaccttcatattaactccacctaaggtgctttttgaactgttactggttctgaggttattacagtgatgaatttcatttctttccaaaatagctatgcttccaggatacagttcaacaccagcaccctgggcgccagttatttcactgtctgtaattgtcaaagcagcccctgtaagaacacacactcctgttccttcacattttaatatgcagttttctagagtcatgt

SEQ ID NO: 794 - DNA, 513 bp, homo sapiens
gtaacaccaagggcaggtgggcaggcctccgccctcctcccctactccagggcccactgcagcctcagcccaggagccaccagatctcccaacaccatggtccgataccgcgtgaggagcctgagcgaacgctcgcacgaggtgtacaggcatttagttgcatgggcaagagcaaggacaccacggccaagaggagcaagggctgagcccggagcacgtcgaggtctacgagaggacccatggccagtctcactataggcgcagacactgctctcaaaggaggctgcaccggatccacaggcggcagcatcgctcctgcagaaggcgcaaaagacgctcctgcaggcaccggaggaggcatcgcagaggctgcagaaccaggaagagaacatgcagaaggcactaagcttcctgggcccctcacccccagctggaaattacgaaaaagtcgcccgaaacaccaagtgaggccatagcaattcccctacatcaaatgctcaagcccccagctgg

SEQ ID NO: 795 - DNA, 552 bp, homo sapiens
  misc_feature (549)..(549): n=unknown
ttcactcagatcttgtgggcttctcggcggcaactcagggcttgagcatttgatgtaggggagttgctatggcctcactcggtgtttcttgggcaggtgactttctcttaacttccagctgggggcttgagcatttgatgtaggggaattgctatggcctcacttggtgtttcgggcgactttttcttaatttccagctgggggtgaggggcccaggaagcttagtgccttctgcatgttctcttcctggttctgcagcctctgcgatgcctcctccggtgcctgcaggagcgtcttttgcgccttctgcaggagcgatgctgccgcctgtggatccggtgcagcctccttcgagagcagtgtctgcgcctatagtgagactggccatgggtcctctcgtagacctcgacgtgctccgggctcagcccttgctcctcttggccgtggtgtccttgctcttgcccatgcaactgctgcctgtacacctcgtgcgagcgttcgctcaggctcctcacgcggtatcggaccatggtgttgggagatctggtngct

SEQ ID NO: 796 - DNA, 352 bp, homo sapiens
ggcatcgtctatgacactggaggcctcagcatcaaagggaagatgtctgcagaacaaaagcattttggacacagtaactccaagtgttcacatggaatgagggaagtgaaggaacgcaggttccgcgtcttcgttttgaccatcccgcactctcgtgttttattttgggtcctctgtttcgacaccgggaggtaggaaatcatgggccctggaggccccgactgtgcccagagccagcccacaggatctgactgtcagagcgattctcagaaggaatgtgggtagtagattttgtgtcgggtcattgctaacgtccatgtaatgttactttcaggataagtaacaacgatat

SEQ ID NO: 797 - DNA, 541 bp, homo sapiens
taaatttctcacttttaatttccagtagagtaaatatcaatagacattgttatacaaaaagcctctttggggtcggtacttgttaagagcgtaaaggggtctccagtaatgcatttgaggcctgctagtccaggctggtcttgagctgcccttgaaatctttgaaaatggagctgtgattttttttttcttgcaaaactgggagctgggctggctccagccggcttgctttttgaggagtgaccatttctgcaccatttgctctacaggcagccactggggagaatgcctgctgcgttgcgtctgcgtttcacaccaggccgttggggagagattgtgagcgccttcaggtcaggattggggtctttgcatcaatggctggagcctcagcgcccactccacacagtaacagctcaggaaaggcctgctggttgatcccaaatccacgtagaacggttccaactgcagcggggaagatgggctggtttaaaataaaaaaccaggtattgtttcactggtgccagaacacccagctcttcctg

SEQ ID NO: 798 - DNA, 419 bp, homo sapiens
  misc_feature (118)..(118): n=unknown
  misc_feature (401)..(412): n=unknown
agcatatgaaacagtacagggttgagctgtcataaagcatgactttgtatctgacctcgcaataattattggaacacactgattagcaaagaaaagcaaactgttggcaatgaagaantttctaattcctggaacatgctcctttgatatggtgatgcattttctgaaacatgccttacacacctccttactagcttttgaaatctgcattgcacaggcgaatatcatgggcatggggtttggcaacccgggggttaagcaatgtcaggctgacgctattcgtgtaaccagcacaggtgcagggttttagtgctgtagcagccaatcaggggcagacagtgtgggttgagtcatattttccgtttacagaaccaatgggtattttacataacgacagggangtcangctgangacatac

SEQ ID NO: 799 - DNA, 427 bp, homo sapiens
  misc_feature (159)..(159): n=unknown
ctaacttcagtatgtcctcagcgtgacctccctgtcgttatgtaaaatacccattggttctgtaaacggaaaatatgactcaacccacactgtctgcccctgattggctgctacagcactaaaaccctgcacctgtgctggttacacgaatagcgtcancctgacattgcttaacccccgggttgccaaaccccatgcccatgatattcgcctgtgcaatgcagatttcaaaagctagtaaggaggtgtgtaaggcatgtttcagaaaatgcatcaccatatcaaaggagcatgttccaggaattagaaacttcttcattgccaacagtttgcttttctttgctaatcagtgtgttccaataattattgcgaggtcagatacaaagtcatgctttatgacagctcaaccctgtactgtttcatatgc

SEQ ID NO: 800 - DNA, 292 bp, homo sapiens
  misc_feature (291)..(291): n=unknown
gagaactaccagcctgtttcctgtttccacctgtaacttctttttgacatgtgtagatcctttttatacatgcccggcagcattttgcatggggccttaattaaaatccagatgaggattgtctgccaaatgtatcattttgaaaatttctcccaatgcatattgaaagggatctagcttatgtatgactgggacacagctggagaagaacatatctctttttaaaaaggaaagttggatgctgaaatcacagattaatttaccactgtagatagaggcatcagactgtgnc

SEQ ID NO: 801 - DNA, 397 bp, homo sapiens
  misc_feature (35)..(35): n=unknown
  misc_feature (393)..(393): n=unknown
acaccaatggtcagtgcttctactttggatcaaanagagagaactccaataggcttagggtgggtcaggtgctcacactcatctgaggaaggggagggtcccttgaggaatagtaccatagactacccaatgttggaggataatggccccaacgcaaaaatgggatcttgccaccagacaaatgggatatagatgccaggctgcaaaatccaacaaatgtacacgtgcccaaatcccgactccatcactaatagccatgcaatcctctgactatcaattagattaattgacactcttttttctctcgctactgtggtacatgcagtagttacctttattcttcactttgttttctcataagactaacaagcagttttttaaaataaagaaatnaaag

SEQ ID NO: 802 - DNA, 108 bp, homo sapiens
aggaactggagtaatgtgattccaatgagcctgtcttgaaggaactcctaggggattaacttcagctaacctgggaagttatctggagaaaccacaacagaaggactg

SEQ ID NO: 803 - DNA, 109 bp, homo sapiens
accagtccttctgttgtggtttctccagataacttcccaggttagctgaagttaatcccctaggagttccttcaagacaggctcattggaatcacattactccagttcc

SEQ ID NO: 804 - DNA, 132 bp, homo sapiens
gtcacgctaagggcaactgtaaactggaataataatgcactcgcaaccaggtaaacttagatacactagtttgtttaaaattatagatttactgtacatgacttgtaatatactataatttgtatttgtaaa

SEQ ID NO: 805 - DNA, 414 bp, homo sapiens
gcatataatgtctaggatttttagttgtacttattgggggaatagggaagaatatgtgtactccgctttcacaaagcactcatatatagatctagtttctcaaatagctaaagaactaaaagtgtaccagcagttctgaggctcagcagtatagcccaagaactatgaactcaggatgatagaagtgaaagaccatcacatggtgaggtcaagggatatctgtaggcacctacttcacagggtccatgctgaaagactgcaaccaatacacagcgcttatctgggggcatacactggaccgatatagtttcacaatcaaaatatttcccaacaaaatgtgcactgttattctggtccccagtcagtgcacctggcctgagttttttagtcaggaaaaatttctcaaagatgatt

SEQ ID NO: 806 - DNA, 441 bp, homo sapiens
  misc_feature (3)..(369): n=unknown
gcntgaacacccattccctcctgttagtctgtcaacactnagggcacagcaaccacttgggcntaggtgaagcacgtggctcttnccatttatggcctggcttttgggcaattgcnctatagtatntatggaggaaaancagaatcatctttgagaaatttnncctgactaaaaaactcaggccangtgcagctgactggggnccagaataacagtgcacattttgttggganatantttgattgtgaaactatatcggtccagtgtatgcccccagataagcgctgtgtatnggttgcagtctttcagcatggaccctgtgnagtaggtgcctacagatatcccttgacctcaccatgtgatngtctntcacttctatcatcctgagttcatagttcttgggctatactgctgagctcagaactgctggtacacttttag

SEQ ID NO: 807 - DNA, 500 bp, homo sapiens
  misc_feature (130)..(142): n=unknown
  misc_feature (434)..(434): n=unknown
cccttgatttgtgctgtgccaagcaatatgggtctgctgtgaatctgcagcctggaagaaacagactcagaagttgacggtagctggagaagtttttgtgagcttatgcaatggccacatctccaaccangctctncccaanttctgagtcagctcctgtttcttagagagctggagggtggatgcttgccccattcagtgcacctttccccttctctacccttggtccttaatgaggatttgtgcatcaaagcacagcgttctctaccactccctttaagtggtaggtggcaaatacctgtcttgtatttcttcccaagctggaagtaggtttttgcttgtaaaactggagcagggagaagagttactatctggagagaatggaaaacatctgcaaaatgaacaaatctcctgttttccgtggcactggggcnttaaacagtgtcacagatggcttcactaggggattatggacaacatgaagagatccaaacatgtct

SEQ ID NO: 808 - DNA, 378 bp, homo sapiens
  misc_feature (316)..(373): n=unknown
ccagaggtaagcaaagacaagaactttacctggtagggatccagtccctgagtccagccaactctgaggctaggctttttcttggctgggtcacatgagctaatagattccctttttatggattaaacaagttcaagttgggttttagtcacttgtaacttaagaaaccctgcataatattgcactgccatcttgattatacagacaagggaactgaggctcagaggtcaactaaatcatcatagaaacgtatattaaggcacaaggttttgaagctggatttgtctggactccaaagccagagttcttttcttanaccattttgcctcccaattgagnccacaattncngntcacaagagaaggggtnaatnaacag

SEQ ID NO: 809 - DNA, 409 bp, homo sapiens
ctctcctcaccaacttctacagtatctgagagtcagctgactaagcctggagtaattcgcccagtacctgtaaaatccagaatattactgaaaaaagaggaggaagtctatgaacccaaccctttcagtaaatacttggaagataacagcgacctcttttctgaacaggatgtaacagtccctcccaagcctgtctcgctccatcctttatatcagactaaactctatcctcctgctaagtcactgctgcatccacagaccctctcacatgctgactgtcttgccccaggacccttcagtcatctgtccttctccttgagtgatgaacaggagattctcacaccctcctcagtcacaacgcatgcaacaagctgagtcatccaatggtgggtaattcctgaacatgaag

SEQ ID NO: 810 - DNA, 591 bp, homo sapiens
taggggcacgttagtattgcggtcagcttaatattaagtagaaggcattaaaggctagaacagtggtgcaaaaagctgtaggtaaatctcttctatgctggctgttagcagagcactgtgatgctatataattgcagcaaactttttttttggttctgctgcactgcagctcataaagggagcactcattctggaaaaaaaaaaaaaagttaaatctagcaagtggttagcaccagcattccaaaaaacttcagcagcctgtgttttcagcctctgctccaacttcattgctctttggaatcaagagcttcatgttcaggaatagccaccattggatgactcagcttgttgcatgcgttgtgactgaggagggtgtgagaattctcctgttcatcactcaaggagaaggacagatgactgaagggtcctggggcaagacagtcagcatgtgagagggtctgtggatgcagcagtgacttagcaggaggatagagtttagtctgatataaaggatggagcgagacaggcttgggagggactgttacatcctgttcagaaaaagaggtcgctgttatcttccaagtatttact

SEQ ID NO: 811 - DNA, 398 bp, homo sapiens
cctgagtccactgtatcaccacaagcctcaacaccaatatctcagagcacaccagtcttccctcctgggtcacttcctatcccatcccagcctcagttttctcatgacatttttattccttccccaagtctggaagaacaatcaaatgatgggaagaaagatggagatatgcatagttcatctttgacagttgagtgttctaaaacttcagagattgaaccaaagaattcccctgaggatcttgggctatctttgacaggggattcttgcaagttgatgctttctacaagtgaatatagtcagtccccaaagatggagagcttgagttctcacagattgatgaagatggagaaaacacacagattgaggatacggaacccatgtctccagttctcaat

SEQ ID NO: 812 - DNA, 613 bp, homo sapiens
tcagtcagagaaaggtgcaacggaacactctccatattttcttctttgagttcctctccttgactttcacaaggtgtctcagggatttcttccacctcagaccctgaagacccctcctctggatggtgttctttaatttccatagcttcctcctgatctaacacactagaaagtgcctcagatcgagtagctggtgacggaactgcctgactccccgaatcacaagtgagatcaatacaaacatcttctgctaccgtttcttctctgcccttgcaaccagtggctaaaatactaatgtcatccctggtgtctgtatcatctccctttgttttgtcatcattctgactcagttgtacttcaccatcctgtgctggattcatcaggatactatcattttcagcaggaacaaatttagaattgagaactggagacatgggttccgtatcctcaatctgtgtgttttctccatcttcatcaattctgtgagaactcaagctctccatctttggggactgactatattcacttgtagaaagcatcaacttgcaagaatcccctgtcaaagatagcccaagatcctcaggggaattctttgggtcaatctctgaagttt

SEQ ID NO: 813 - DNA, 403 bp, homo sapiens
  misc_feature (139)..(139): n=unknown
  misc_feature (351)..(377): n=unknown
tggacacagcagggtcagagcaggggctcttagcggccctgttctcactactcagtttcaggggactgcattcctctctacaaagggcctggggtcccactgtctgcttagtgctgctctgctcccaccatgactttangggagggggtcatggacccagcccccactgtcacctgtacttctgccctgggatccctcaagactggggtgggaggtactaaaaaagcccccaccctcagggccaggcttgggtcagagccaggggtctgaggaagcctggggtttccatccttaccccaaggagacgatacagccctcctttggtggggctcagcgtcccccagagcccanccttgtcagtgttgacttagtgggactgccaggtgtgttggggttgtgtgtg

SEQ ID NO: 814 - DNA, 433 bp, homo sapiens
aattaaaatctccactcccatgtcccccggacacacacaacccccacacacctggcagtcccactaagtcaacactgacaagggtgggctctgggggacgctgagccccaccaaaggagggctgtatcgtctccttggggtaaggatggaaaccccaggcttcctcagacccctggctctgacccaagcctggccctgagggtgggggcttttttagtacctcccaccccagtcttgagggatcccagggcagaagtacaggtgacagtgggggctgggtccatgaccccctcccctaaagtcatggtgggagcagagcagcactaagcagacagtgggaccccaggccctttgtagagaggaatgcagtcccctgaaactgagtagtgagaacagggccgctaagagcccctgctctgaccctgctgtgtcc

SEQ ID NO: 815 - DNA, 362 bp, homo sapiens
atccccatagcctcataaaagtacttttttttcagttttatttcccgtcagaagcttgtatgaaaagcatttgaagtttcaaaagctgcctatgtctgagaagctgatccagattctagcccaaagagggtgaaatagatcacaatttcttccgctcttatctttgactacagcttgtccttttgcccttctctcccctgctctgttagacttcgctgctaaaaacatctcgtgttcccacagccctcttagcttcaaggccttcttgcctcccataaaaacctacttttcaccctcaaggccagcacctactactctgacctaacctgttgtgtcctagcttctgtcttctccaggcgagc

SEQ ID NO: 816 - DNA, 451 bp, homo sapiens
ctgggaaaggttttgatggagtccagagacagaaggtggggaagggaagaatctttacaagcaatttgaggtgcttaggatgcaagggtgctcgcctggagaagacagaagctaggagcacaacaggttaggtcagagtagtaggtgctggccttgagggtgaaaagtaggtttttatgggaggcaagaaggccttgaagctaagagggctgtgggaacacgagatgtttttagcagcgaagtctaacagagcaggggagagaagggcaaaaggacaagctgtagtcaaagataagagcggaagaaattgtgatctatttcaccctctttgggctagaatctggatcagcttctcagacataggcagcttttgaaacttcaaatgcttttcatacaagcttctgacgggaaataaaactgaaaaaaaagtacttttatgaggctatgggga

SEQ ID NO: 817 - DNA, 382 bp, homo sapiens
  misc_feature (342)..(377): n=unknown
tctttctcctatgcttcagggtttagattctaggtcagttgggactgtgaaaaaaaattaaggatccatttcagattcatttttgtgaatccttattctacctagcatggggtcctgctcatagtagtaataacaactgttaatatgtatatagtaccctctatgtattaggcactgttctccaaggacttaatatctattcgtttaatcttcacaactaccttcattgcaaggtatgtactgttatcatcatatatgagtgagggaagagaagaaatgaattcacatccccaaagtcgcagaactggaattcaaatccaaacaatctaaataatgaactgngnaacaaacaggtggnatgttaggccttactaganggcat

SEQ ID NO: 818 - DNA, 433 bp, homo sapiens
  misc_feature (314)..(315): n=unknown
tactgtatctttgaaacatgatctgtatattcagcaagtcctaagcttcctaatgtaaaataatctgtttaatattgtatttttatttgcaagtacattaaaacaaatcttattttacttgacagtaatatttatgatgctgacatcctcatagggcttatctgttttgggattgactttgacgttggagatcctctgtacaacttccattcctttagtcactcgtccaaatactgtatgcttattatcaagccaaggcgttggtactaccgttatgaaaaactgggatccattagtatttgatcccgcgttanncatgctgagtgtgtacggcctgtcatgtcgtaatgttgaatgaaattcatcttcaaattctcctccccatatgctttctcctcccataccagtacctgttggatctccagtctgaatc

SEQ ID NO: 819 - DNA, 339 bp, homo sapiens
  misc_feature (261)..(326): n=unknown
gatggcgctctccagggtgtgctgggctcggtcggctgtgtggggctcggcagtcacccctggacattttgtcacccggaggctgcaacttggtcgctctggcctggcttggggggcccctcgaaagccttgagccgggccatgcttctcacatcttacctgcctcctcccttgttgagacatcgtttgaagactcatacaactgtgattcaccaactggacaaggctttggcaaaactggggattggccagctgactgcncaggaagtaaaatcgaagctgagctgtctcnnttgntgcaaaangnggtcctgctctcnaaaaantaccttgggaaaa

SEQ ID NO: 820 - DNA, 404 bp, homo sapiens
  misc_feature (17)..(61): n=unknown
  misc_feature (314)..(380): n=unknown
tttaaaaacagtgcttnatgcatttacaataagttattacagaactctaagtcactgatgnacacacaaaagctaaacccaacttactaactatgcagacctctcctgatctccccaggctgggcagtaattagtaccttacaggtgtgatccatggcccagagaaggcagccactgtcagttacagttggactgctggatcacagtggaggcagcagagttgaagatccacagagggctgtaatacagcccagaaaagacaatggagagtgaaggctagaaacattgaggaaggggtcaagaagcacttgtanttccngttatcttttgcaatagaatattcctgnaagttanncatcagaaaaangngttcagagggnttgaaaaagaagtggttagcccat

SEQ ID NO: 821 - DNA, 320 bp, homo sapiens
  misc_feature (120)..(178): n=unknown
  misc_feature (299)..(299): n=unknown
gattctttcaaatagggagctccccctagtgcgttttagatgagatttacacaagtttgatttgcagggaaccttttaggagcacatatgttgggtaaatcaagggatagtttaataagntttaactgagctcaaagtagtacaaaatggatatgatttatttcctatagagcattantttaatggtggtataatttaaatgagaaggaatatccccaaacccagattttattttcttttaaaacatttgcaaaatatttcttcagaattttatactctaaaactgttttctaaaaganaaaattctccagtcatgatct

SEQ ID NO: 822 - DNA, 281 bp, homo sapiens
tttagagtataaaattctgaagaaatattttgcaaatgttttaaaagaaaataaaatctgggtttggggatattccttctcatttaaattataccaccattaaattaatgctctataggaaataaatcatatccattttgtactactttgagctcagttaaatcttattaaactatcccttgatttacccaacatatgtgctcctaaaaggttccctgcaaatcaaacttgtgtaaatctcatctaaaacgcactagggggagctccctatttgaaagaat

SEQ ID NO: 823 - DNA, 212 bp, homo sapiens
  misc_feature (62)..(151): n=unknown
tttggacacggacggatacgcgcacaggaagaacaccgtgtaaagactggaattctgctccnnnnnnnnnnnnnnnnnnnnnnnnnnnnnnnnnnnnnnnnnnnnnnnnnnnnnnnnnnnnnnnnnnnnnnnnnnnnnnnnnnnnnnnnnngatcatggacttccagcatccagagctgtgtgacaataaatgtctgttatcttaagtggtt

SEQ ID NO: 824 - DNA, 228 bp, homo sapiens
  misc_feature (10)..(209): n=unknown
tctggatgcnggaagnccatgatnagagngacagcaggtcngcnccctctgaaggntctaaganangntctgaagcangcccctctcccagcntctggtgatgccttggctcgtngagcagaattccagtctttacacggngttcttcctgtgcgcgtatccgtccgtgtccaaatctttctttttccttnnntnntngttttaaagnnacagggtttttctcgaatt

SEQ ID NO: 825 - DNA, 162 bp, homo sapiens
  misc_feature (4)..(152): n=unknown
gtgnctttctgactantgctgccacccacacagagantaaggagtagggcctgctgggtgtttagctcnnggcntnancttgnntgtnccccncctcctnncacgcnccagtttntagagaaacagagntggtgtgtgtgtatgcctcaaangcagaaacag

SEQ ID NO: 826 - DNA, 450 bp, homo sapiens
agtttgtgaaaagtgatgcaatttgttatacattcaaatgcaaattagaactagctgccttacgatgagatttcactgtcatttttttagcaccctaatttttgtcggttctgtaggtttcaagtagcagaaacttacatctatttccttcagaaaattaaggagcagatattttaatatgctttatgtaaataggattctgataattttagctttagttaatgcaacacacttccctgggcacaaccatgacctctctgagaactggaaaatactgcataattttaaaaatcagagtgtaatgacattccctgacaacttcaaataagttatgtgaggaggatgaactatgggtagtctagaccaccagtcatatttgtctagccgtagaaacagtgacaacttaaagatctgcaaagatcagagcagagctggctgaaggtgcagcat

SEQ ID NO: 827 - DNA, 452 bp, homo sapiens
  misc_feature (65)..(68): n=unknown
  misc_feature (408)..(408): n=unknown
gatcaaaggaagagccaacggcactggataggagattctagcatttggctgcttctccaagacangcnaggttagaagggagttgagaagttatgtcatcttccactgcagcagataccccttttttagtacttggagatcccccgaatcacagcatttctaaatcagccctggattccacaagtgaagcagcggaggaaccaggaggtcagcggtgtcactcaaatctgtggcaatcaagtgggagttctcaaaaggctatcaaaggaagggggttatgataaggaaaggctcaagacctgcctcagaaggagtgagcagggaagagcaggactgactccactcagtgcaggatccagtacaaaatgaagatgtgaggcttttgtgcaaacagcaggaaaacattanctttacaggtactaaaatgtaatgtttttcctttcttccatagt

SEQ ID NO: 828 - DNA, 391 bp, homo sapiens
  misc_feature (272)..(386): n=unknown
agtagcaaataaaaaacacagccataacaagttgagaaagacactatggaagaaaggaaaaacattacattttagtacctgtaaaggtaatgttttcctgctgtttgcacaaaagcctcacatcttcattttgtactggatcctgcactgagtggagtcagtcctgctcttccctgctcactccttctgaggcaggtcttgagcctttccttatcataacccccttcctttgatagccttttgagaactcccacttgattgccacagatttnagtganaccgctgacntcntggtncntcggctgntnaacttgnggattcnagggctgtttngnaanngcngnantnngggggttnccannnnctaaaaaaggggtatctgctgnattgg

SEQ ID NO: 829 - DNA, 398 bp, homo sapiens
  misc_feature (49)..(109): n=unknown
  misc_feature (242)..(291): n=unknown
ccttcctgaaatgtctttgaaggaagtgtcaccctttccaacactctgncagccataactgcttgggaacaggtctccaggatttgggttccatagagcagaaggtagncctctgccctcatgtctagagggatgaataacattctgaaaaggtacagggtgtgtctagtcacaggagtcacctgcaaggctccaaactcaggctggatggccccttggggagtgaattctgcaagagttgnacctggggcnaanagaaggagctggaatcactgattctgtatcctggcnacatgccttagaccacaggaaccagactctgaagcaccacagatgtttctgtgaacatctggagttgggaatcactgagttagatcaagaatggattcggctgccat

SEQ ID NO: 830 - DNA, 408 bp, homo sapiens
  misc_feature (5)..(398): n=unknown
tgacnnncaaattcaanaaaaaaacattagagctgaaaaaaagttattttaatcnatcaacctgttccaanaaaagctgctacacatcancctgnctaaatctgtggtaaccctgttttagagagttcttgaaggctactagggggcaaagaggcatggagattcagtctcatggcttatattatgnattccaaataaatagtgttttctgaangcagttgcccaaatgcctaaagtggctgactggantnatnctcactcntgatggntntntaaataccttatagnnntgtctncngggaaanacgccaagcnancctttgaaattcctcaaagctgnacactcatcacctnnganttattnacaacctcnnctgnnantgcnctntnggcnacangctctgcctg

SEQ ID NO: 831 - DNA, 461 bp, homo sapiens
ctcaaaattcctacactcttgactagtgcaatttggttcttgaaaattaaatttaaacttgtttacaaaggtttagttttgtaataaggtgactaatttatctatagctgctatagcaagctattataaaacttgaatttctacaaatggtgaaatttaatgttttttaaactagtttatttgccttgccataacacattttttaactaataaggcttagatgaacatggtgttcaacctgtgctctaaacagtgggagtaccaaagaaattataaacaagataaatgctgtggctccttcctaactggggctttcttgacatgtaggttgcttggtaataacctttttgtatatcacaatttgggtgaaaaacttaagtaccctttcaaactatttatatgaggaagtcactttactactctaagatatccctaagggatttttttttttaatttagtgt

SEQ ID NO: 832 - DNA, 459 bp, homo sapiens
  misc_feature (424)..(424): n=unknown
ggggaatccccagcaagggttcttctccagcttcttcaccagcaaccagaagtgccagcttaggctcctgaagacgctggagacaaatccatatgtcaaacttctgcttgatgctatgaaacactcaggttgtgctgttaacaaagatagacacttttcttgcgaagactgtaatggaaatgtcagtggaggttttgatgcttcaacatctcagatagttttgtgccagaataatatccataatcaggcccatatgaacagagtggtcacacacgagcttattcatgcatttgatcattgtcgtgcccatgtcgactggttcaccaacatcagacatttggcgtgctcagaggttcgagctgctaaccttagtggagactgctcacttgtcaatgaaatattcaggttacattttggattaaanacaacaccaccagacttgtgtgcgagacagagcca

SEQ ID NO: 833 - DNA, 430 bp, homo sapiens
tagctataaagatacaatttctgccttggagtttaaagcagtttcattttttgccatagttactttttctgataatatgctagaatcacagtcttctctgttttatctggattgtagggattgtttacattttatatgtttgttcacttgagaaccaaatttttttttcttcatgatgatggaagctctgtaatataaaaatgtcattgtgctcatatatttgaataataccgatcacggttttcaaagtctctgtgagcatatcttgcataagtcttgttatgtgggatccttccaaaaggttcatggtcattgaaacaagattcaaaaacttcatcaacagcctttttagctacttctttgctgatattcctaacagccaggatagaaagagtggctctgtctcgcacacaagtctggtggtgttgtt

SEQ ID NO: 834 - DNA, 341 bp, homo sapiens
  misc_feature (186)..(320): n=unknown
cttagcagagctttctaggagccctatgagcctttaatgccctggttttgccctgcccctctgacccctgcctccttcaggtatgcacctggccctcaccactgtgctcctgtgggcatgggggagtctccaggcctttgaaattgtggagaaggaaaacatttttcagaggaccccctgccctgntttcctgatgtttgaaaatgcagcctacctggccgacatgagctttgagcttccctgtcactgcaaacccgaagaggtnccagctgtagtctggttctaccaaaagcacctaggtagcagccacaccaaanttntgacggactttgatgggcggg

SEQ ID NO: 835 - DNA, 472 bp, homo sapiens
  misc_feature (133)..(133): n=unknown
  misc_feature (466)..(466): n=unknown
gttcacactttccttctctgacctaaatgtgaagtcaggaaacacatgtgccctacttccatcctgagctcagtccccaatctcccaccagcctcaggcccctccacttctcagatcaggtcccagacctgcncatgaaaatggggagcaggctgtaacagatttgtccacatgttcctaccacctgtcccaacccagggtacccacccagagacatctggtatcatttaacaaacacattgaaggacaactggtcttcagagctgaagagagctcctagggggagaagctgggacaacagtgaaataagtagcagcagcaacgacagaagtgaatggtgacaaagactgctgtgatgagcaggtagcctatcagggtgagctccacagccgagcgagtctcaggatctgagaacgaggctgggtagcgcccatgagatgtcacacccagccggaagccagcaacnagcaca

SEQ ID NO: 836 - DNA, 307 bp, homo sapiens
  misc_feature (204)..(245): n=unknown
gccaattaagctctttttcagtcttgggattgtttttgccttcagttggtagccctcaatagaaaataggtcttctgtcagcagatgttgacaacaaagaaagggaagcttttaatttgttcactaatagtgaaaaagcaaacatttacataacacaaatgtactgataaacacaattaaggatatatgcttgcctatttgtgntccaagtgttcaattanaattatataattattgtgaaacanaggaggatgatgttcaagctatcaccgattggcctgctcttcatgtttgttaacattccggg

SEQ ID NO: 837 - DNA, 418 bp, homo sapiens
  misc_feature (389)..(405): n=unknown
ttcatatggaaggaaaacatcatattaagttaatatttaaacgtacacaattataatttgcaaaaaaaaatcaagatgataatttcttaaatagtaaattgaaataaatgatattttcctagcatgcttgtcattcagcaataataagaaactgagataagaatgcaggcagttgaagttcacttcagcctgagtgcaagtatacacaaaacagcaaaaatattacatagaaaataaatgttgtccattggattgagtatggtgctaccatttgtcacagtgttcatattcatagttgtggctatctttggggtcactgctgtattcagacttgtcttggaatttggagtcatctagggatttgaggtcattttgagatttgggcttgncccaggattggtgcgnccatttgtcacag

SEQ ID NO: 838 - DNA, 391 bp, homo sapiens
caaaagctcagttttggagaggataactcccctgtgatactctcaggaccacctcagtcctttagtgaagaagattcatttaaaaaatgttcatctgaagttgaagctaaaaataagattgaagaactacttgctagtcttttaaacagagtatgccaagatggaaggaagcctcatacagtgagattaataatccgtcggtattcctctgagaagcactatggtcgtgagagtcgtcagtgccctattccttcacatgtaattcagaaattagggacaggtctccagtccccagatttctgtgcatcctctctcatgcaaagaaggctggaagacaaacttgtgaagctagagggtgtttttactaaacactaaaggagttttactaaag

SEQ ID NO: 839 - DNA, 450 bp, homo sapiens
  misc_feature (37)..(46): n=unknown
  misc_feature (221)..(299): n=unknown
gataaagatgaacagaattagtggtttctggggttanncnnnnngnggaggagcagaaagaaagtggctttcgctttgaaagggtggcaggagggatccttgtgataaacctgttctgtgtgttgactgtggcgtggtcacatgaatttgaaactcctttagtaaaactcctttagtgtttagtaaaaacaccctctagcttcacaagtttgtcttccagncttctttgcatgagagaggatgcacagaaatctggggactggagacctgtccctaatttctgaattacatgtgaaggnatagggcactgacgactctcacgaccatagtgcttctcagaggaataccgacggattattaatctcactgtatgaggcttccttccatcttggcatactctgtttaaaagactagcaagtagttcttcaatcttatttttagcttcaactt

SEQ ID NO: 840 - DNA, 339 bp, homo sapiens
  misc_feature (69)..(207): n=unknown
ccccaagcccctcgcagaccgcaggagtattttcccttcagaacctgttgcatcagaatggggaaagcnagggctgagaatcccagaggaggccgtgaactgttctggaaaagcgagggctttgcagtcagaccttcatatgcantttgttctatctgttgcgctctgcctaaatgaccacgggccagtgactttacctctctgatncctgctccttgcctagatagtggggatcacgtcgtaatgtatgtaaagaaccgggtgcgggacttggcacctgggaagtgtcttaatacatgtctgtcgagaaaaggaagggtctcgacgtgcggaaacaag

SEQ ID NO: 841 - DNA, 477 bp, homo sapiens
tcgttttattattgcgttttatgaagttgccaagacaactgaggccaagtaacagaaccttgactttatgcgccatgaaaatttaataaagaattttgaaaggctttttagaggcaggagctgcagtctcttaaaggcagagctcagcacagagcggagggggctggagcacgtggggcctctcaccagacctccaggagcctccgctgtcaggggcgtggaggtgggcagacgtatttcctggcatccgtcttgtttccgcacgtcgagacccttccttttctcgacagacatgtattaagacacttcccaggtgccaagtcccgcacccggttctttacatacattacgacgtgatccccactatctaggcaaggagcagggatcagagaggtaaagtcactggcccgtggtcatttaggcagagcgcaacagatagaacaaagtgcataggaaggtctgactgcaaagccctcg

SEQ ID NO: 842 - DNA, 303 bp, homo sapiens
  misc_feature (26)..(258): n=unknown
ggtttttctcatctttaaaatacaantanttatgctcttaaatcaaggctgtctgcttatttatantagcgtaggcaacacttggntttcnntancttagtatgcttcataactgntttacagagagcttttgcttgttctttctcatgtatctcgtgtttatgtgcacagtgccaaaagaagactgactgggtggaggctctgnttgcctcaagaaccatcccctgcagagcatccagggaggtttctcggcccaanagcctcacggcacagtactcttgggcagtaactggacacctttta

SEQ ID NO: 843 - DNA, 515 bp, homo sapiens
agtatcattacagaaaatgttatggtacagaattgtttaacattattttgtctttgctcttgatttccacatgaatgctggtaacactaatatctgtacaagatcagtctttgattttatttttttgttctgtacaattttaaatgtattggttaaaaaggctgtcagcacttaaggaagcattttttcttcagtttgtttcttcaaataaaaggtgtccagttactgcccaagagtactgtgccgtgaggtattggggcgagaaacctccctggatgctctgcaggggatggttcttgaggcaaggcagagcctccacccagtcagtcttcttttggcactgtgcacataaacacgagatacatgagaaagaacaagcaaaagctctctgtaaagcagttatgaagcatactaagaagggaaatccaagtgttgcctacgctagtataaataagcagacagccttgatttaagagcataagtagttgtatttaaagatgagaaaaaccccacgc

SEQ ID NO: 844 - DNA, 508 bp, homo sapiens
  misc_feature (5)..(90): n=unknown
  misc_feature (389)..(437): n=unknown
caagntcacacaattaattagtggcgaatcataatttgaagtctttctaatgcccaaatgtttccattgtgtcacatatcggagctgtgntctttccatcagccagtttcccattatcatagctgatgacatgcacacccaccatctggggcaggctttagtacagcactctgtgccatcatccagatcaccaaatcttagtaaatggacgtgtcataagagataaggctgccatagaatcacagcagcttctggcttagtaaattacctggatacacaccttttcctagaggaaatcccacatcttcgtagaagatctggtgtaatgctcttgggacctctctctagaggatgagctagtatcactgggtcctagtaagtttcagcanntatantagagacagaactgtcatcattatcagaaaagaaacagaganaaatgttaaaacaatggttttgtgaccttaaagtctgtgttagtccccttagcaccaccgctgagattttg

SEQ ID NO: 845 - DNA, 503 bp, homo sapiens
  misc_feature (154)..(154): n=unknown
tctgtcttcttcaatgattcccccttgcccgtattttcagctggaacagtttctcattttccctatttctgaacactttcaggggcttccttcagtgaagcccaacacacaaaacgtccctttcagcaaaatctcagcggtggtgctaagggantaacacagactttaaggtcacaaaaccattgttttaacatttttctctgtttcttttctgataatgatgacagttctgtctctattatatttgctgaaacttactaggacccagtgatactagctcatcctctagagagaggtcccaagagcattacaccagatcttctacgaagatgtgggatttcctctaggaaaaggtgtgtatccaggtaatttactaagccagaagctgctgtgattctatggcagccttatctcttatgacacgtccatttactaagatttggtgatctggatgatggcacagagtgctgtactaaagcctgccccagaaggtgggtgtgcat

SEQ ID NO: 846 - DNA, 557 bp, homo sapiens
gaatttctgtgtttctaaagaatctaatttcaattactaccattaacatataaatgtgcttccaaaatccaagcaggtccatacaatttagagatttgaacactgttatcatgctttaattcagtcattcattaaaatattatctattcacttatttgatgattccaaacatttgatattgtattgtgtttttataattatttgaaatctgttcaccagtgctttgtaatggttttattaattgtgtagccattgctacttagatagtaacccactgagcaaaggcagtcatttattttcatccttgaagtaggggaagaaaattattaatttattagttctactttttcctgcattgcttattttgtaaacattttattatgaataatctgttctctttcactgtattaaaaggagaagaaaatgaacatttgagaatggaaaaaagtaataatatacaaataatctagtgctataaaatgcattatagtaagacacttttggtgtcttcgagtggcacatgttgggaataaattttatactgttgcttagtaaat

SEQ ID NO: 847 - DNA, 554 bp, homo sapiens
  misc_feature (43)..(43): n=unknown
attcgctacaatgttggaactattacaaagctggataaaagangctttagtagcaatagaaagcaagagcaataaaaagtgaatagagaaaatatttggccttactgatctcttggcagtatttacattatgtacatattgttaaatatttataataattctaaggcaccaaaggctaaatagcaggttgcaatactatcctgtgcacaaaaatcaagaaatttattgtaaagaggctgtatagttaaagaaacataggcatatcttaatgtttacataatggagcggctgcatttttaaaaatctcaaatgatacattaaatattgggcagatcgaagatattatttttagaacattaaattatattgactatgtaaataagcactattttttactgacttgctggtaaatgtgaaatgtaatctattcgtcaacacagcttttttcacactcatggatatgttttgtctaaaaactacttgaaattcttctgacctacaaaaacttatcctaatattccataatgtatacaaaattcccaagaagaatttac

SEQ ID NO: 848 - DNA, 525 bp, homo sapiens
ctggactttcattctcaaaagcaatccatatgtgccttttgagagcctggcagttatattcatatggcatatttagatcttagccaagaatcagacatagctctccttccctgttgcttttctccatcatccttccacctgccacccatttgctccatgactcctgcctttctcatttcctttcttgcatgcaaactaaaaacaaaaacaaaaagtcatgtgatttctttgtcctacttttctctcctctgagatgaatttttaattgtcagcaacaatctaattagtcctgaccagagcctgttctttctttcagcctatttgcttttgccttcagggttagtagctggcaactaatatccactagaactgaatcacccgaattatcatagggctgagctaatatcctggctgtagatgctatcataggcagaaagaaaattgaaaggcaagttctaccatgggcctggctgtaagcagccactgttaggtccagactccatgctttaaagttagcctcaagat

SEQ ID NO: 849 - DNA, 508 bp, homo sapiens
  misc_feature (453)..(500): n=unknown
tcccatacaaaggtctagtctgatgttttgtgtacaaactcacatctccaattaacagtatttattgagggtgactttgtattgcactaacgtctattgctattacctgttgtgattgataagtaaagccactcattgaaaaacccaattccaaacaccacagtttgtgacacatgaagtaatgaatgactcttggtatgaaaacgtggcatttaagcgtctactgtgacagtatttcatttgtggacaaaagtagctttaaagcaagtatctggaaaatttttagcacacaggtttaaaatggtcctgcacgttgcaatacagcagcacgtgactcagagtcatgacaagggggtgtgatataacgaatgaaataaaatttccaaactgtttttagttaacaatttaacttgttccaattgctaaaggggcatatttaaaaggtaataagtnaaaagccgtgtactttttaagattaaagaaagtancaaaggatgtcnaatttttt

SEQ ID NO: 850 - DNA, 361 bp, homo sapiens
  misc_feature (66)..(66): n=unknown
gacaggcaggacgcagcgggctggcctgcggggctcactgctgccccccggggccgagcacgaaanggagagttggagggcgcttcctcgccgggtgttgcggtgtgagcggggactggtgagtgtgtgctgtcttcagagagagaagagcagttttcaggaatctatctaccgccggggagccagaagatggaggaagctgtaccgtgccaacggccacctcttccaagccaagcgctttaacaggagagcgtactgcggtcagtgcagcgagaggatatggggcctcgcgaggcaaggctacaggtgcatcaactgcaaactgctggtccataagcgctgccacggctcgtcccgtgac

SEQ ID NO: 851 - DNA, 540 bp, homo sapiens
  misc_feature (12)..(12): n=unknown
ttcctggcgganaggtcagtgcatcgagttctgtttccgtggaaaatgtgcaccttggaaaccgcatgacagccccctcggcagggtccccgcggatccgccgcgacgcaggcacagcagcaagttcctccagcacgaagctggcctgcccgggcccaggtgtgagggactgttctgctcccagcagcgcccgctgacgcttccctctgcggtctcggcgcaaggtctgtccctggccgccctcggagccgtgcccagcctggcatgcatatgcggtggttaaggatacagttaaagggtcaatcacgcgtgtccacgacagagacgcacgcggcctcacaccgactcctcggtggacagcaataatgggttgatatactcaaagccttcgaactctgactggtcgatcctctttatggcatcctcatcgtctggggtcagctgcacgggctcgctggtgaactgtgtgtcaaagttgtccagaccgtagtcgtctgtgatctgtggctggaatggagggaacgctgctttcttctccag

SEQ ID NO: 852 - DNA, 318 bp, homo sapiens
gcatttttaactcatggagaatcaaataaaacaagttttattctgggcctgataacacatcaccctggcctagttttcgttccctggagagacttgcagatttgcctgtcactttggccagtttatcacagagtggcatgtgttcctatggcctggggctggggctgcatcccttgcttctgtttggacccagagtcctgtggagggcaggaatgaggaaggtgacaccccctgtccacgctcacacaggcccatctctgctttacctccagggactctttcagaatccaaatctgttaaaactccaagaaaacatag

SEQ ID NO: 853 - DNA, 282 bp, homo sapiens
  misc_feature (7)..(166): n=unknown
gaaagantccctggaggtaaagcaganatgggcctgtgtgagcgtggacagggggtgtcaccttcctcattcctgccctccacaggactctgggtccaaacagaagcaagggatgnagccccagccccaggccataggaacacatgccactctgtgataaactggncaaagtgacaggcaaatctgcaagtctctccagggaacgaaaactaggccagggtgatgtgttatcaggcccagaataaaacttgttttatttgattctccatgagttaaaaatgc

SEQ ID NO: 854 - DNA, 459 bp, homo sapiens
  misc_feature (77)..(77): n=unknown
cacagacccagccgatgactcctcttcctttgaccccgtggattttctccctcctcgacagcatcttgatcttccanaagagcatcatgatcctccaccgtatgtccctgctccggctctacccctctcccccactctctccaaccaacccacttctgactctgagtcctctctgcctcctcccctcacccgctctcgggcccaatgtgctcagcaaccagctcccttgcttcctctccgggaagtagcgggagtagaggggatcgtccatgtccacgtccctttctccttctacgatctcttacagattgaagaacgtctcgggtccttctcctccgatcctgatacttacatcaaagaatttaaatatcttactcaatcttatgaactcacttggcatgatctctactttatcctctcttctaccctccttccagaagagaaggaaagagtgtggct

SEQ ID NO: 855 - DNA, 304 bp, homo sapiens
  misc_feature (21)..(21): n=unknown
atgagatcacatggaccacangaaggggaacatcccttctctttcttaccctaagtgaaacctgaccataacctctgaggacatatttccactgcagactgcaagtggtggctgatgtttctctcacagccttcattactccggtactacaggtagagatgggtctctcctttgcagcttccaatgcgtcctcttccctaaaatcccccctttgaatgcatgtcatcacattgtgccacttctatgcctcttctttgcggttaaacacacacctagtcttttgaagataattcctggctcattg

SEQ ID NO: 856 - DNA, 455 bp, homo sapiens
gcaaggccggctatggagctgccgtcgtgtgaccacagtgtgatgtctcagaagggctctgggtgggctgagcatctgggctgtgccctggctctgcttttcaccctggacaaagtcgctgtggacttcaatttcttcacctctaaaatgggggacttggaccaggtagattgctgagctcactaccaggttcaaagttcaatgacaaactcagtttactgaggtttgagagaacatccctccaggggagcctgggagctgctctcccagtctaagcatgtagatatcatcgtttgccttttgtgtgtgtgtgtcccttatttgataaaaagatgttttgagttgttttttttttaagcactcacttgtaattttagtttttaaacccaagtccctctaactttgcctttgataccaaacaattcaaaagttggatctgagtttggagaaagata

SEQ ID NO: 857 - DNA, 514 bp, homo sapiens
  misc_feature (263)..(497): n=unknown
tccagatagcaacagctgattgttcaaagtgcagggtttttggatattcaagtaccacaggatcggagaaaaggagtacttgaaacctagagttgcgttttcacttgagaagacacactttggaaacacctatccaacagactacaaatataggctattaaattaaaaatctggtttcaaaataatacccacttaggttggaaatatctttctccaaactcagatccaacttttgaattgtttggtatcaaaggcaaagttanagggacttgggtttaaaaactaaaattacaagtgagtgcttaaaaanaaaacaactcaaaacatctttttatcaaataagggacacacacacacaaaaggcaaacgangatatctacatgcttagactgggagggcagctcccaggctcccttggagggatgttctctcaaacctcagtaaactgagtttntcattgaactttgaacctggtagtgagctcagcnatctacctngtccaagtccccccttt

SEQ ID NO: 858 - DNA, 532 bp, homo sapiens
tgtatacagaacatccttcatggtctaagcagaagaaatgatggagttgggggaagaattcgaactctttggtgtggtttcctgttatttatcctcaaaataatttattctcattctttgcttgtacaccattagccttaggctcgtgtaacagcctcctttttcctcattgaaatgtatgtaatttccttctccactggaatataaaagattgattttggatccttcaagctagatttagaaatacttatgtttttatagtgtttgcagctcagtgagtagaccagtgagtaatttagtgtgtagctcagtgagtcatttaaattcctgttttaaaatttgagtccctcttccatcaggagctgattaacatgtacatttcccctaacctaacctgctcgttttttttctttttgagcttttctccccttcttgagcttgtttgtttgtttttaatatttttccttctttgaaaacaaaatgttagtctcctttgattaagctgcagtctctgacctacatacatacaggt

SEQ ID NO: 859 - DNA, 466 bp, homo sapiens
  misc_feature (4)..(4): n=unknown
  misc_feature (111)..(426): n=unknown
agcnttgggctatctttaatactccccaagcatcttgggcaactcgtaacctttgtctcagtttcataatcaataaaataggaaaaactacaaggatgaataattaattanattagtcaggattanatgctagcaaactgcttngaagttactttatgttgttctcagttatcttcctactcagtaaaactaatagatgagaaaacatctggnattactatagatagtcacatctgcagactcacagcagttaaaaagacgatctctacaantttctgagccagagttcattcaangaccccaaagattntaagatacaaccacaatgaacaattttaggtgaanttcttttcagtctcaaggacacctattcttaacctanatnctcaaaaggaaccactacaacagaaatctcagagngtcttnaggggtcttggcacaagacaattctaggtaagatgaacaa

SEQ ID NO: 860 - DNA, 531 bp, homo sapiens
gtttatctctgggagagctattgaagtgcctgacaggagaggacactaagagtacctccagtctccaactgcctcctccggcagaactgagcaagtcctaaccatgccaaaaacatcattatctctggttccatcttagtccctgcacaccctaggattcaaggactcaagtaagttggggaggggaacatcttttcacccctggaaaaccttgtctcctcccaagccctgggaggggagaactgctgctaatgagatgctggtagttagtcttgtaatttttacagtattatctgcagaatgaatgactaccagcaggtactctgaatctcttttctttctaataagatgtaatcaacgaaccagattgtggccttggagctgaccaaaggatcagctaaaggaattggacacatcctgagctagttaacacatgggtattgtcggtctaagatgctctttaggggctagtgactcattcatgatgtgcaggaaatggcacagacacctccatgaccacagaaggtttct

SEQ ID NO: 861 - DNA, 450 bp, homo sapiens
  misc_feature (194)..(445): n=unknown
cctggtttcagatacagtcttatgaagaggttcccagctgaagagattggaaggcagatggtagccctcctttttttctttccagtagtatttttagtgtcatgatgtaatgaagtaaagcagtggcctcaaccctgaccacatattagaatcacccagaaagaatcactcattcattttttttttttaatgtncaaganattctgatttcattggncnggggtggggcctggacatnaatgttgtttgnaanatcctnanatgactggaatgaagccaggctnagaatcaggcatatggccanacagagaggnctttgggaatagaaccaggatgnggtaaactcnnangtanaatccangtctcnancccngccttgccttcccctgancctctctntntnacttccttctgttngtagaccctntgatgacggcgcctgnanaaacc

SEQ ID NO: 862 - DNA, 347 bp, homo sapiens
  misc_feature (108)..(129): n=unknown
  misc_feature (315)..(315): n=unknown
gtgggaaggccttcagccagagctcatctctcattcagcaccagaggattcacactggagagaagccttacaagtgcagtgaatgtggaagagccttcagccagaatngccaacctcaccaaacaccancgaacccacaccggagagaagccctacagatgcagcgagtgtgagaaagccttcagtgactgctcagctcttgttcagcatcagagaattcataccggagagaagccctacgaatgcagcgactgtgggaaggccttccgtcacagtgcaaacctcacgaaccatcagaggactcacaccgggggngaaagcccttacaagttgcagcgaagtgttgg

SEQ ID NO: 863 - DNA, 353 bp, homo sapiens
tgcatgtggctctgggctgcagactctaagttagatgtcttcagatgctttcaagcctttagcatttctcagatcctcacccacctgtcctgagtcggcatgtccgggactctctccacttctaccatgttcctagttactctccggcgtggagtctctgatgtctaacgaaggcagagctgcaccggaaggccttcccacactcgctgcattcgtagggtttcacgcctgtgtggattctctgatgctgactaagggatgagctctggttaaacgctttaccacactcattacactcataaggtttttctccggtgtggattatatgatgccgaatgagggctgagctctca

SEQ ID NO: 864 - DNA, 119 bp, homo sapiens
  misc_feature (51)..(105): n=unknown
cctacgctgaaattttgggggcaggttctcttgctaggttttgaggttttnctgaagatattcctgaagaatcatcccaggtgccacactaaaaaaatgatccanttgacagctacccc

SEQ ID NO: 865 - DNA, 199 bp, homo sapiens
  misc_feature (148)..(148): n=unknown
aagaactgaaaaggtatatgaccgggtatcagtggaagctgtgttgccaatggacaaacgactggacagacttatttctcactgcggcccagtaacaggctacatctttgctttgttggcagttttcaacttcctcttcctcattttnttgagatggatgactccagattctatcattgatgttgcaatagatgccact

SEQ ID NO: 866 - DNA, 161 bp, homo sapiens
  misc_feature (17)..(46): n=unknown
  misc_feature (159)..(159): n=unknown
gagcgatggctactttncttagcaagttccggatagacttttctnntatcatggttctaggagatatcaataccaaaccaaagaaagaaaatattatagcttttgaggaaatcattgagccatacagacttcatgaagatgataaagagcaagatattnca

SEQ ID NO: 867 - DNA, 224 bp, homo sapiens
  misc_feature (31)..(205): n=unknown
gcctttcgggccagtgggatttatgaaaaangccatctctatagctgaggatgaagaatggaagagaatacgatcattgctgtttgcaacattcaccagnggaaaantcaaggagatggtccctatcattgcccagtatggngatgtgttggtgagaaatctnaggcgggaagcagagacaggcaagcctntnaccttgaaacangtctttggggcctacagca

SEQ ID NO: 868 - DNA, 236 bp, homo sapiens
tattgattctttagaaatatttaaattcttactagtcatttaaataaaattagttctttaaaataatacaagcactaagacctacagcagaaataaactagaaacagcatgattacaggaacatccaagcatcatttggcaaactgggtttcagggaagcaaagccttttcagtagtaactaatggaacatactcactttcattttccttctaattatcttcaggttaaaagtaag

SEQ ID NO: 869 - DNA, 440 bp, homo sapiens
gctacacatatacacaaattatttaaaacacattgctggtgctcattcaacaccataaattcatacaatagctgatatttagtagcagttcgaacatggtgtagtcacaacagatgtgtccatgtactatacataagaggggctgatttcacctattccatattttgacatattggggaaaatgggcagtggcggaatcctgaaacacaagctgcctttagagctaattgagtttttgctgcccaactgaactggaaatttattcaagatttgcagcagatatcagccatgcaggatgacagctgtagatggtgacacatccattaaaaatttgaatttctaaaattcttcatatttgtgaaatcagtacactttataacttaagaatgcatacatgttttgcctcctctgagactagatttagcatctgtaaatgagat

SEQ ID NO: 870 - DNA, 396 bp, homo sapiens
  misc_feature (112)..(122): n=unknown
  misc_feature (272)..(370): n=unknown
agctattaaaggtatttgaagaaactataggtatagtggtgaatactcgctgatatgaatcccagaaaaaaatttcctgtttttaatgttcttttcaatcccatctagatantttatagaantataaccctaattggacatgtggtacaggatctataagttgctgtgtttttttgttactctgtattttgttccttttggtaaggtgaagtgtgtccaaagagttacttgcaacagtctttcatgatatgaggatgcccccgtattaccantctgattatagttctgagttctttgntttactcatgctgcatgacaaaatgtttactaataacaattcattataaagttatatccctctttacatcanttatctttctcactgaggttcattca

SEQ ID NO: 871 - DNA, 428 bp, homo sapiens
  misc_feature (402)..(424): n=unknown
tagcattggactaatagtcattatccagattatctttatttcacacaatgaccagtgacatggccaagatgtacaaagttggttccatcaagtagtatacaattttttgtataataatctttcattcttgaaaaagagtaactgaaaagaaaggtttctgttactgcagttagtttgtcagagaaagttctttgcattatcttataaactatcaaaattgctagtcatctgaaaaaatgtaaaaaaaaaatcacataactttagtctaatagaaatatagtacaggtgagagagaaagtatttatcaggatgtgctctttaagtccatctcatttgtttttcaatataaatgtacatctgattacatatacaaacatttggaaaggtctgtgatatactgtnctggcaaacaacagggggatgnagag

SEQ ID NO: 872 - DNA, 410 bp, homo sapiens
  misc_feature (46)..(146): n=unknown
  misc_feature (403)..(403): n=unknown
attttacattcttttttccaaatgaagtcttcaaaatccaatgtgnttttcctcttagaaaacatctcagtctggcnnnnnnnnnnnnnnnnnnnnnnnnnnnnnnnnnnnnnnnnnnnnnnnnnnnnnnnnnnnnnnnnnnnnnngttcttcattaggagactgatggggggggtccttcctggtgggtcactcactgccatagctcttgtcatagctgatgaaggcaggagtgagtcttattatgttggcctagagtagaaagcacagagctatgtcgaggctgctgtctcagcctctggaagttctgcttcacctgcttagtaagaggagatgaccactcctgtggaactgcatgtcccatctgcccccagaaggtgtcggcgctgccccagtcatgtcncttatga

SEQ ID NO: 873 - DNA, 393 bp, homo sapiens
  misc_feature (268)..(391): n=unknown
tatttattttttccatgaacaagtcatttaattaattaccagacacttgtttttcttcaatcgatggaaatacaatatttctgccaattcgaaaaagaaaattgcaagatgcagtcagtttcagtgaagtccccaaatgctctctgcttcctcagtcctttcaaagtcacaggaacctggcaatttcccttttcatcccccctcccacttccctgctaaatttacctctcagaacatcacaatagtgtcaagatctggtttgaatcgnctttcctgtaattaattaattatgagaaggaacagacagtncaacagatctgataagatgtagcattcttgttaagattnaacnacacatttattcacaacnnatcagaacaaattaaccatnag

SEQ ID NO: 874 - DNA, 562 bp, homo sapiens
gtcctatccatttcaaagcagaagctgtggaatggtattaaatattttttaaaattaattcacctgtttaaaagaaaacattgcatctcaaaaggtgaagatgattgttctttcttccatatcctccttacggcatgtccttggataacttttcaaaaggtatccacacttttggttgagtttagttttcttagaaagtagagaagtaacactttactagaataatgaacaaggaattgatttgctctaggcccagctctgccataaactcattgtgtattcctagacaggtctttaacttcatcagtgtgttgtttttgtgaagtgcaaaataaagatagtgatagtttctgctgtagccctcatagggacattgggaagcagtataagaaaaacttcagcaacatcatgattattgatgctaataggaaaaataaattcatgtaaccctagagaatccaggtcaattgtatttcctttggaaagcagtttaacatgtaagcgttcaaagatgtgattcagataaaatacccaggtccatagtgaagatgtttttcagtat

SEQ ID NO: 875 - DNA, 431 bp, homo sapiens
  misc_feature (272)..(429): n=unknown
cacaagactgtatattgtttgaagactgaaataattttctagtgtaacaactctgtaacaaaatttaactaaatgtaacatttatgaaaatataaatctctgattgggtaattcttcccaacgatacaaagtttacataaaaacattcaatatgagctatcagttgcaaacaagttaggaaaaatcattcaagtcacttgtatactctattggcttttacatagaacattcacatactacatttaatccatctaggcatttaattcttaganatgtgtggcatggaggttcaactgataatgacaggaatgagaatgtgttgcctanagagctcnanagcatagactcatataatcaactccaggtgatctgnatgtggtttgcctnctctgggctaccatctccctngctagtagctaaaccatcagnaa

SEQ ID NO: 876 - DNA, 399 bp, homo sapiens
  misc_feature (89)..(89): n=unknown
  misc_feature (326)..(399): n=unknown
ggacttcgctgacgaaagtgccaataaagacaatgccacagcaccagaaccaaatgaaagcacagagggtgacgatgggggcttcgttncccatcaccagcacgctggctccctctgcgagcttggggttggggagtgcccctcggggagtggcgtggagtgccccaaatgcgacacggtcctgggctcctcccgctcgctgggcggccacatgaccatgatgcattctcgtaactcgtgtaagacactcaagtgccccaagtgcaactggcactataagtaccagcagaccctggaggcacacatgaaggagaagcacccggagncggggggtcctgtgtctactgcaaaacgggcagccccacccccggctggcacgaggcgagaactacacgtgtn

SEQ ID NO: 877 - DNA, 334 bp, homo sapiens
  misc_feature (27)..(327): n=unknown
aattggtttgttattaatttttgtatntaaattcatttgtttgnatngtncatcttcanagcntacaatctgnnggtgncngttcctacactggtcagaccactgtccttggggcagctggggtcttngggaccctccacngggctcncnggtccgtcggacttttggcngagatncgngncanantcctccnaatagtcgtctgntggcatcgagggcngaacccctgangtgctgcatgaacttnnggtaaccgttgaacnncacgagnnangngnaaaagaagnggggttcgctgccgaagcccgggagaccacttgcgnnnangacttcc

SEQ ID NO: 878 - DNA, 345 bp, homo sapiens
ggccacagtacttactgaggacttcatatggtttttttgtttattattattgagaaaagagctgaggttaccacattcattctttgtgttagaaatgtaggagtgtggtggttttctgcaatatttagagcttagtctcataatttggaatttaagataataagtagtaacaaggcaagtcttttatgtaagacagtcaaacagtgtcacttcagggacaaaggcctggaagcccttaaaataagttatcttagatgtgccagaacatattcagagctttattcctttaagcttaaggcttcaatacttgtagaaatgcaaatattcttgagaaatgatacattt

SEQ ID NO: 879 - DNA, 450 bp, homo sapiens
gtacgcatcaaggcaacagaatacacatggaaatattggcgtataattcagcattcttttggaggcaagagggagggtgaacaataaacactaccacctaaaattaaagattgagacatacatggtttcctcatgcaaacagtaacaaactacctttagtgtgaaacgaactctgtagaaacctgattttataacagcagatgaattttataccaagatctccaagaaaggaggaaaagtcatgatcctcagatgtaatgtttaaatctgcatttagcagcatgtgaagatgcacaaattacacattagacaaatctgaaaaattttacgattatggaatcttgaatttccttctacattataaaaatgtatgtaaaaccattgtttaattactaaaggataataaatgttggttgagagtggaccatgaatgataaagcatttaaacat

SEQ ID NO: 880 - DNA, 514 bp, homo sapiens
gagactctcagtcataaaggaatgaccaagagagtgggtctccagtgagagaaatgcctatgaaagagggtttccctttttgctcttttgaacaccctccccactgatccttgggacccaacgccgcattgcctcttgcagatgaggttttgccttgggctgcttgggtacttcagaccaggactgagtctgacacagctttcatgaggttacagaaaagggctacagatttgggaagctgtgtgtaatggtcttgagacaatatctccatttggcccaccctggcttctctaaaaagcaacgacagcaacagacaaacaaaaagctcccacctcccaccccgttagctgtcctcctccttcactgtgatgtggttgcggtctctgtaggtgtgtgtgccacccttgtcctctgtcctctggggatgtgcccttcccacgtgtgtcaggttcccactctttcgtggttcctaacgtgaagtgctgtgatgtttctgccctgcctaaggaacgta

SEQ ID NO: 881 - DNA, 379 bp, homo sapiens
aattgcagacaaaagattcactacgtgggtagtcaacattgctaaccaatcacagaacaagatactaaccacagcaaggaaggggtaggggcttgtgactcagtctttgagaacgtgcgagcattccatgggatatcgaggggtcccaaagaagaaggctgctcgatccccacattcttcatctcatcagcgacaggtctccctcccagaaccccatcaggacaggagaaaaggcagcaagagaggtggggtggtcctggcacgtgggccaccagtcttctgaatgaagagtgagtcccgggtcaggagtccacatcaggtgtgggctgcttccaatctgtaggttctcctggagattgtcacaatctgccagctctct

SEQ ID NO: 882 - DNA, 238 bp, homo sapiens
  misc_feature (126)..(228): n=unknown
acaacaaaaaaaggaaaaataacgcttcaatgcttttaaaacagcaagataatagttctttgatactttgagaggcgctttgatgaccctcatccaagtctatgacactttcctatggttttctgnatnctatgnctggatggagctgtnaaaagatgaacaanttggnggatntttggggaaancaacanaattctnaaanctcncccgtgaattgtgaaaaancangggggggaac

SEQ ID NO: 883 - DNA, 184 bp, homo sapiens
gtgggattagtttcttagggaaatgcctaagggtaccagcctaccaagcataaggacatcatttccaggttttaataatcaaaatagtacaacattctactattcataatatcctattatttctgtaaccttcgtagttgcaagtttgtttttggtttttgttttatatggccctaacaaaaat

SEQ ID NO: 884 - DNA, 260 bp, homo sapiens
  misc_feature (2)..(254): n=unknown
cngacggtnntcataanaaacaatagaaaaacatcaatnaaatcaaaactaataaaattaatctcaagccatatgaagaaagaagttataaactatnaatatcagtaataagagaagtctcattactatatattctatanatatnaaatggataaaaagtnaatattatnaacaagtttatgccanaaatattcaaaaccttanatgaaatggacaaatttctttaaagacaaattaccaagcctcactnananaaaaat

SEQ ID NO: 885 - DNA, 297 bp, homo sapiens
  misc_feature (180)..(289): n=unknown
cttctgttccttgtttgtagagatttttaaaaatcaggaatatttgttagattttgtcaactgctcttttttaagctttttaataagatggatcacattgactgattttcaaacgttaggtcaatcctactttcctgggattaggtctcacttggtcataatgtattatccctttgatanattgctgaattcaatttgcaaaaatngttntttttaacaaattttgcttttncanttatnngagntatnggtntataggnaggnttctntncttntnatancttgggcnaattttgt

SEQ ID NO: 886 - DNA, 211 bp, homo sapiens
  misc_feature (63)..(83): n=unknown
  misc_feature (193)..(197): n=unknown
aatatcctattttatcccattttagaacccagacttccctaatagtactggtgtcaaattgcnnnnnnnnnnnnnnnnnnnnnggtccccattttgaatctttcctggcttcaactcacatgtactacatctagtttttcctctacaaacagttgcattctcttacctgtgttcaggtccacacccacgagcngacntgattctgaatgtt

SEQ ID NO: 887 - DNA, 490 bp, homo sapiens
gttccttccagttcaatttaacagcttcagtgaagttagtataatgataagaaaaattgactgtagctattattccaagtgaaaatcatgcagctgagtcctgctgcatcctggaagcaaagcattaattcaaatgaggagtagtcagtcctagcactgtagacgccgactttaccaaccaagatattgtatgtgtgtgacattcagctaacattgatctaggcacttagtttgctaccacattgttcccttcattgattgaaactgtaaataacataacactttaaggcagctaagcaaatattttaataagccatgaaaggcaagatgccagagaaaatctgtatattcagctatttggagaactcgtgttttccacaaattaaactggagatgtcatttgaaattttcttcccttaaacatgctgtcacaacatggattccttctcatgggatggccttccaaggcttataaatatatggtgtgatt

SEQ ID NO: 888 - DNA, 442 bp, homo sapiens
caggaattcattaggtcagaatagaacatcattatttacacattcaaggaataactccagtgctaaatcagcgaggtacttacactgaatttaggaaatatgactgaagagagagtttcttcttacacatacaggctcaaatcctttatacatttatttctgccttggaatcttagtacatattgctgaaatcactattaattgctgaataaaatttcacaaaattatagcaatcacaccatatatttataagcctagaaagacatccatgagaaggaatccatgttgtgacagcatgtttaagggaagaaaatttcaaatgacatctccagtttaatttgtggaaaacacgagttctccaaatagctgaatatacagattttctctggcatcttgcctttcatggcttattaaaatatttgcttagctgccttaaagtgtt

SEQ ID NO: 889 - DNA, 243 bp, homo sapiens
cttaattagttgctttcactatttccgaatatacctgtggctaagtttttattgaaacactcaaaaataccacttctcagtatgaacacaattgctaagagcctaatttggttctggactatggtcaacctgtgtgccttgttagttctctccagcagctggtgagtaaggaaatgacccttcaatttcctcttctttttcctctgacctctgtgacttaatttttcttaatgtctccaagtc

SEQ ID NO: 890 - DNA, 446 bp, homo sapiens
tgcaactaaatctaacagtatttgtacgagtactttcaagctaaagtactgctaaaaaatttcaacatgcatgcaattcgtttacataataacataatttattataaaacctgtgactctgagcactttatggaatatgtgcttatggaataccctctactgtaacatggccacatctgagaaaagagatgctgctgagcagaagagtcctgtgttcaattttgttgaaatgggttggctgctcagactgttcaggactgctactgtgctatgatagcattgcttgatagctcaattcacatcagacttcagaagactttcaagcacaagccgttagccaccaacaaactggtagcacaagcagccttggcaaaacacagttactatgcaggtgggctctgttttaagcaaagtcgatattgaaaatccaaacatacaaaagagat

SEQ ID NO: 891 - DNA, 454 bp, homo sapiens
gaaaaaaaaagaaagcgaaaaatggatgtaagcaagataactcgttataccgaggattgctttagtgattctaattgtgtacccaataaatcaaaaatgcaagaagtagactttctagaacaaaatgaagagctacaagcagtagactcacagaaatatgcattatcaaaagtgaagcctgaatcaactgatgaagacttagaatctgtggatgccttccaacatctaatttataacccagataagtgtggagaagagagttcacctgttcatactagcacttttctttcaaataccttaaaaaagaaatgtgaagagagtgattctgagtcacctgctactttcagtaccgaagagccatcattctacccctgtacaaagtgcaatgtgaattttagggagaagaaagcacctccacagggcatatgatgtatctttagatggggatagtcac

SEQ ID NO: 892 - DNA, 154 bp, homo sapiens
  misc_feature (49)..(145): n=unknown
ccccatgtgcaatgcctcgatggcattccaattcattttctgtcactgncatgaagntanacncttcanancannantaccttttanctttttcatgggtnttaacntgntgnacaaatgtttnagggcaattggtaccnaacnnacactgagg

SEQ ID NO: 893 - DNA, 188 bp, homo sapiens
tccttaccgtaccataatctgaatgggctctatatacaggtgctgtggagcatcttttgtaaaaacttccttgtggtgacattttagattatttttatgggatatagtccaccaaccgtaattacctggtcagcgttttaaactcttgcaacactaaatatatacacctacaatatacccgcaaaaat

SEQ ID NO: 894 - DNA, 151 bp, homo sapiens
  misc_feature (108)..(108): n=unknown
gttgcaagagtttaaaacgctgaccaggtaattacggttggtggactatatcccataaaaataatctaaaatgtcaccacaaggaagtttttacaaaagatgctccanagcacctgtatatagagcccattcagattatggtacggtaagg

SEQ ID NO: 895 - DNA, 462 bp, homo sapiens
  misc_feature (262)..(262): n=unknown
gctgggtatgtctcatggagaggtgctttcactgcttccctgttcacctagtcttcaatctggtccagagtttcagccccatctctggagttgagtcctgccttctccctcaatgtgacaaatgttggccaatggtatatcgcagttgtgatgcaagcagaggcttggtaaatgcctgcatactggggtttgtcctcttggaatgctcatttgtgggagccctgaacaactatgtaagaagtctggctaccctgctggaganaacacatggtgggaagagactaaaattatgtgaagagagtcaggccagccatcccagcttctctgctgagccccgccatcagccaacctgccagctgaatgcaaccgtaagagtgatcaccagcaagatcactagaaaaaccacctaactgagcccaccctggattgaacaatcataaacaaataaaatggttattgttt

SEQ ID NO: 896 - DNA, 97 bp, homo sapiens
  misc_feature (3)..(74): n=unknown
canttangtggtttttctattgntcttgntggtgatcactcttacggttgcattcancnggcangttggntnnnggcgtggctcagcagacaatctg

SEQ ID NO: 897 - DNA, 398 bp, homo sapiens
  misc_feature (183)..(262): n=unknown
gtcctcactccagcttttcctagatccttgataggtctttctctcttttctactggtcctctcttcaagttagatttttaatttttaccttgagaaattagggcctcatgggacagaaaaagtagcacagggctagaaacctggtaactttgattctattcctcattctcccactaacctaannnnnnnnnnnnnnnnnnnnnnnnnnnnnnnnnnnnnnnnnnnnnnnnnnnnnnnnnnnnnnnnnnnnnnnnnnnnnnnnctccagcatctgaatgacacacagtctgtgattctgcaatccagtgataacaaacttcttcaaaattatgaccatgatgttttacttgaaaaaaaaaaagaatatcttgttgaatccaggtcatggtgtggaaatt

SEQ ID NO: 898 - DNA, 397 bp, homo sapiens
cagcaggaaagtttgtttcccacagccctgaaaccacaatacatgcatggcaacctgttacatctaagaaaaagttaacaattacaaaataattataacaaaagagaacttggctgggtgagctgatgcatggaaaccctgccctgcatatactcaggtatagacacatttcttcaaacacaaagattcaagctcaaaaccaagaaagggaaatacctgaaggccaaaaagagagaactcaaaatcagagcagtaagtgggagttgaagccctgcagctaaggagcttgttgggccttacgtagacttaatggcagagtcttggggctttaagggctgtgggtggggatccaggctgctggtcctgtgtacaatgttcaagggggtgatggaactgt

SEQ ID NO: 899 - DNA, 63 bp, homo sapiens
  misc_feature (13)..(13): n=unknown
cggacgcgtggtnagcaagagaactagaagtagagactgaagatgtggctgaattgctgcaat

SEQ ID NO: 900 - DNA, 119 bp, homo sapiens
tttacactgtagtctgttaagtgtgcaagactattgtctaaaaagcagtgtatgtaccttaatttagaaatattttattgctaaaaaatgctaatgacaatctgaacctttagcgagtt

SEQ ID NO: 901 - DNA, 550 bp, homo sapiens
ccggattcttcaatcaaccccgaccacttgtcttatttccactttgtggggcggatcatggggctggctgtgttccatggacactacatcaacgggggcttcacagtgcccttctacaagcagctgctggggaagcccatccagctctcagatctggaatctgtggacccagagctgcataagagcttggtgtggatcctagagaacgacatcacgcctgtactggaccacaccttctgcgtggaacacaacgccttcgggcggatcctgcagcatgaactgaaacccaatggcagaaatgtgccagtcacagaggagaataagaaagaatacgtccggttgtatgtaaactggaggtttatgagaggaatcgaagcccagttcttagctctgcagaaggggttcaatgagctcatccctcaacatctgctgaagccttttgaccagaaggaactggagctgatcataggcggcctggataaaatagacttgaacgactggaagtcaaacacgcggctgaagcactgtgtggccgacagcaacatcgtgc

SEQ ID NO: 902 - DNA, 459 bp, homo sapiens
  misc_feature (22)..(422): n=unknown
gggtgggagtactatggtaaangagggatatatgggtggganccaccaacaananntncccatccccctcccccaacagaaagganananacaaccctttcccctcaggtgntntgganttccagggcctctgccagntttgcaggaggtgcacanaagctggatgcttttggtctggtggccatgagctagactctgttgcctttggttgnntttcacnccacagcaaacccgcaggtctcctncacngntgtcagcancttctcgtagagnttctcataggantcatatngtggantgtcnntccggttaaagcaggtatnggccttcggaaggttgtctgtgttcnngtctatcaggtggatggtgaacanccggggccctgccgcgnctgtagnaccttgcaaanccttgaagccttngagcgggactcgcgtggacccagtcacaaactgcagg

SEQ ID NO: 903 - DNA, 290 bp, homo sapiens
agacctcaatgtatgggtgctatataaatgtgaagtagacataaaatctgcctgttatatttgtcctttgttccataattaatgttttgggacatgttgggccagtaccatactgtcagtcttggaaactctcagttataaagtggtaatatagtcaagcattgcaaaaagggggccactaccctaggtggataatatttaatttggcatgtgatacttaggaagaaaattggtaaaatcaggattggctcattaccttcataaagaattttcaggaagttttgtttgca

SEQ ID NO: 904 - DNA, 372 bp, homo sapiens
  misc_feature (3)..(361): n=unknown
tgngnngtntgctttctggaaacatattggaacacttntttttcataagctgtcctgacagtggcacaatcccatccatcttcaggccttttaataaggtcattatgaaatctgaatttctattaatactctggtgcatncatttcatctgcaaaagcaactggcacaaccactccttgccggtgcagctctcggagaacatctaatattgngtctagttctgtgcggaactnntccagctcacgnttcttnnacngtgccannctnttccatttnncnncnncnttgtccngcncagngtcnacnannnggtgtnntngctgnactancngnngaanntcctgttccctttgtgcatgtntcatttccaat

SEQ ID NO: 905 - DNA, 175 bp, homo sapiens
  misc_feature (78)..(146): n=unknown
gtggagtttattggaccatttttgacctctagtaatggtgggctcacatgtttgagttgagttgggtcaggtgctgantncctgctgctgcaggcacccaaccttgtgctttcaggttaactctaaccacacatctcatgccttcnctgtggcatgtatttgaagttaactgaaa

SEQ ID NO: 906 - DNA, 128 bp, homo sapiens
  misc_feature (4)..(96): n=unknown
tcantcangagancnacaactacntgcnaaccatagtcttcaatccgctaagatgagcaattctttctgtcnacactgnctaaccccaactgacancagagaaaaaccacgaggcctgtggctgcccc

SEQ ID NO: 907 - DNA, 429 bp, homo sapiens
  misc_feature (183)..(221): n=unknown
  misc_feature (357)..(425): n=unknown
gaatcagtcagtttcatgcaacagaagcccttttcaatggcacctttatatttttatcattcctttttcttcatttatctaaccccaaagccctgatatgccacagaaatggagctatacagccatgaagcggtgttacaggtgaggagtgtaatcctaggaagcatcaggtgaaaagcaggngaccaaaganntggtcaggaacaatcatcagccctccnctgggcgggaatcagagcagtcagtccagcaggaagagtggcagactttgtagctccatgggcacgtcaattactaatgctaagatgtgttggactctgaaaaacaaaattctgtggctacactgtactgaatganattaaagaaactttttttgcgnggncacanatagctgaatacttaaattatttctngggggctgcaancttg

SEQ ID NO: 908 - DNA, 470 bp, homo sapiens
  misc_feature (118)..(136): n=unknown
  misc_feature (413)..(429): n=unknown
gaacattcaaacatcttaaaattaaactttagcaacaaagtttaacattcaaacaggagtatagtttacaagaaacacccagaaaggtaatttgttgtctaatccagaatattgatanagatcacttaatggtgantaaaatatgtttaaccagtggttctattctggccaacatgttagttatgaccgtggttccatacctgagaagaaattactacataaatcttctcttaggctaaacaacaagactcggtctataattcagaggggataatcaaagcacgtaagtgaacaaataaaactaatctgatctttagagacaaaggtaaaagtattgtccattataataattgtagcctctggaagataagaattcaattttcagtgttttctcttttacccgctttaaaaanaaaanatcaanacaanacaaaccccaactcgggtttcttggagtctgtggtctcgag

SEQ ID NO: 909 - DNA, 430 bp, homo sapiens
  misc_feature (54)..(57): n=unknown
  misc_feature (354)..(354): n=unknown
tgacacttactattaccgtcgacggcaccgacatgagaggacacagactcaganngnggaggaagaagagaaacctcagactacatattctgcatttattcagctacttccagttcttgtgattgtgattatatctgtcattactcagctgctggctactaatcccccatatagtctgttctataaatcgaccttgggctacaccatttctagagaaactcagaacctgcaggtgccttactttgtggataaaaactttgacaaggcctacagaggagcttctctgcatgacttggagaaaacaatagagaaggattacattgattatatccagactagttgttggaaggaganacaacaaaagtcagagctgacaaatttggcaggattatacagagatgaacgattgaaacagaaagcagagtcgctg

SEQ ID NO: 910 - DNA, 508 bp, homo sapiens
  misc_feature (481)..(481): n=unknown
ggaacataaataggaacaagtagcaaaaccccagccctgcgtaggaccattatcctctcagccacctctgcgtaggccaatgagtttggaaagtttctcacagttttcaagtttcagcgactctgctttctgtttcaatcgttcatctctgtataatcctgccaaatttgtcagctctgacttttgttgtttctccttccaacaactagtctggatataatcaatgtaatccttctctattgttttctccaagtcatgcagagaagctcctctgtaggccttgtcaaagtttttatccacaaagtaaggcacctgcaggttctgagtttctctagaaatggtgtagcccaaggtcgatttatagaacagactatatgggggattagtagccagcagctgagtaatgacagatataatcacaatcacaagaactggaagtagctgaataaatgcagaatatgtagtctgaggttctcttctncctcctccttctgagtctgtggcctct

SEQ ID NO: 911 - DNA, 438 bp, homo sapiens
ggactctagatcttgtttatatagtgagttctttaaaaaactgaggtcttggttctgaataatagtggtttacataatttatttagaatgtcatttggggttatctctgacctatttttataaaataatctcatctttaaaataggagtaaaatgctcatttgcataagccagtaataataatttagtatttttccaagtatttatagtcaatgtgtttgccatgaacttttttaagggattgtttttaattttagaagtgctttaaaaagcaatattggcatctggctctgtagaagtagaaaacatggtaacttcaatgtgatatatttgcttttttcccctcttaggtctttggggtaaaaaaaatcccaaagtttaccccaattttaattctaccatatattacctacaaatttatagaggtgagacctgcttg

SEQ ID NO: 912 - DNA, 374 bp, homo sapiens
ggactaaaacttctacccatgtttacaggtatttcctcaccaggctcaagtgaggaaccatgcgagaaccctttggaaactatgaaacactgtacagacgggaggtattagtatcactgacaggtatgaacaggcagcaagcaggtctcacctctataatttgtaggtaatatatgtagaaataaaattgagtaaactttggattttttttaccccaaagacctaagaggggaaaaaagcaaatatatcacattgaagttaccatgttttctacttctacagagccagatgccaatattgctttttaaagcacttctaaaattaaaaacaatcccttaaaaaagttcatggcaaacacattgactataaatact

SEQ ID NO: 913 - DNA, 490 bp, homo sapiens
catagacattagaatcaagtctcttggcattatttctagttggtatatcttttatgctaaaaatattcaatattcagttgctggtcacaaataatttctcccccacaataggtattgtcttctaagaactctgaagcaatgtcagacattgagggaagctctcattgctgcaggaaaagagattatatggcatgggcggacaaaagaagaaccagctcattactgtagcatttgtgaagtggaggtttttgatctgctttttgtcactaatgagagtaattcacgaaagacctacatagtacattgccaagattgtgcacgaaaaacaagcggaaacttggaaaactttgtggtgctagaacagtacaaaatggaggacctgatgcaagtctatgaccaatttacattagctcctccattaccatccgcctcatcttgatattgttccatggacattaaaatggagaccttttctggctaattccaggga

SEQ ID NO: 914 - DNA, 76 bp, homo sapiens
tactccatgtatttacccctccctctctcccactgaacctctggcaaccagtctttactaactttgctttctccag

SEQ ID NO: 915 - DNA, 423 bp, homo sapiens
  misc_feature (253)..(344): n=unknown
gcccagggcccctcctgcaccacgggccacatgcggaggacggcgtgggataggctccctgggtccacagcttctgcccgtgtatggggaaccctccttggtcagggctgcaggctctgggcagatggggcaggaaccctgaggctcccgcgccctcccatggcctctgatgtgggacactggagcgaggcacgattctgaaggactccatggatctgggaggatgaggcccacctccggttggtggccaaanccgtccttncggggccggctgcttcacggacactctccgggtcgggctggtgggccccatcgtgggtgggaagtcgcctgagctgggccgnccttgaacttctcccagtcttgactttccagagggtccgtggctgtggtcatggtcggggcaagtggaaaattctgcat

SEQ ID NO: 916 - DNA, 359 bp, homo sapiens
  misc_feature (73)..(73): n=unknown
cacctccagagccaagtggaggagctgaagtcatctggccaagggagaaggagcccgggaaagtgtgaccagnagaaaccggcacccagctttgcatgtctgaaggagctgtatgacctccgccaacacttcgtgtatgatcatgtgttcgctgagaagatcacttccttgcaaggtcagccaagccctgatgaagaggaaaatgagcacttgaaaaaaacagtgacaatgttgcaggcccagctgagcctggagcggcagaagcgggtgactatggaggaggaatatgggctcgtgttaaaggagaacagtgaactggagcagcagctggggggccacaggtgcctaccgagcacggg

SEQ ID NO: 917 - DNA, 520 bp, homo sapiens
  misc_feature (106)..(106): n=unknown
  misc_feature (289)..(291): n=unknown
  misc_feature (395)..(431): n=unknown
tgttttaagtgcctctgcttctagtttaaatgaatgacccagacagagctttcaagctgtttcttagagaatgtgtggttgagcagaaatggctatccacacctgncacaggtccccacccacctcacaccctggaggcagcagcataagccccagtttccactatggtgtctcctcaatgaccagaatacccgccagttccaggggtcagcaattccattctctctctccggctcagttcagaagctgtgatggtcctgttagagagcactgcctgcaggtcaaaacntngaagaggctctcccaggccaggcgacaacccttcaggtgcagacggggaacaaaaggcttaacctgtgataatcccaacaccttctgaaaaaagagtaacagtnatncagcaacgggccatgggtangggcgggcggtanaggggacactgtcccctgcctcagatgtcctgtccagagggtgggcacagatataggctcgcttctcaagggatctgcttggacacttt

SEQ ID NO: 918 - DNA, 182 bp, homo sapiens
  misc_feature (117)..(176): n=unknown
gcggggccggcttggggcttggttctatgtccctgcgggtcggtgcgagggcgaagaggaacccgtgggcctcgggggatcccggggggccggaccagtgtcccctagttgtgggancagacgcgtgggcgcatcgcgggcnggcanggcctnaantncagaantttatacgnganctaatt

SEQ ID NO: 919 - DNA, 242 bp, homo sapiens
  misc_feature (212)..(226): n=unknown
agacactgggaagaatgtctacagcagatagaaatgtggtgtcatctacttccatcctgacttacaaaggggtggcttagagcccctggagtactaaggggctggaaattgctgaactacatagatgtgtggcacagggcaggtgtctcctcacctctgcctcttttcacagttcactgatgtccttcccatgtccaggtgggctgggtcangggcatgattagcnggcaaatcagtcatgg

SEQ ID NO: 920 - DNA, 362 bp, homo sapiens
  misc_feature (304)..(304): n=unknown
tcggattagtcagatgctgtgagaggaggtggaaaaaaccagtgtagaatgggcaggcacctttgaaaaggctagaggaaaattttggaagggcattaaggaggagcatagcaaagaagtctagacctatgacttggagctgttctgttatataaataggatatccagagatagcaaactgctcactgcaggaaataggggaaatagaggtaatttggaagaacaccccactgttatattgtggcagttatgttctataaagtcgctgtggacgtaattagtgatactgagccattgctcctangggaacaatacagagttagattcctgtgagcctctggttataacgattttgtcagctg

SEQ ID NO: 921 - DNA, 330 bp, homo sapiens
  misc_feature (65)..(67): n=unknown
  misc_feature (278)..(315): n=unknown
ccttttctcgttttaacattttatttctttgtccattttctaagcagttaaaatgaaaatgtttncntatgattgttgtggaaaacaagggactgagaatgtgaaggaccatttggttctcagctgatgttctcaaagttaaactttcatagtacctcacgaggaggctctacatatggtcccagagatatgcttacaatattttaagaagacatttatctcacaactttaagcttgtttcacactttctgatcacacctcccctggtgtactatgancaaatattcttatgtaaatccnataatttccccatanataacaaaattaaaa

SEQ ID NO: 922 - DNA, 517 bp, homo sapiens
  misc_feature (278)..(416): n=unknown
tctgactgctatggttatccaagaaggcaccccagaatacctgttggccaccgctgtttggtatatgcaaaaatgtgtagtttttaaaagagtctttttgggcttgcactgaggagccaccctattttatacagtcaaaatattgctatatttaagttaaccattctgttccagtgcaggattcagtaacatctattctgtaagtttcagttgtgatatttcttaaagattcaaagatggatcctgggaatttgatttagcctccatttcatctgggnnnnnnnnnnnnnnnnnnnnnnnnnnnnnnnnntaataattaaaccctcctattcacacatatttcattaatccttacagcaacctgagagatagtttannnnnnnnnnnnnnnnnnnnnnnnnnnnnnnnnnnnnnnnagaggttcagtgattcgcccaaggttataacagcaagaatggtggtgaaacaagaattcaaatccagattggtcttaatagtgagctctcatgtgtggata

SEQ ID NO: 923 - DNA, 518 bp, homo sapiens
atacaattcttcactgatgatactggtataaaatggtggttattaattcatgctagcacaaccaaaactaatttaacattattggtaaaaatgagtcatttttgaatctctattaaaatctgaacacataaacaaatctgtgctaaaactggaactgccttctcactctacatataattaaacttccagcttcaaccatctgatgttgaaatctaaagcacctccatgagttaaatgtccccgacaaaccatgtagatggacaaacaagattggtggtctttaattgctggcgacagaaaaggctgcagtttagtacttaaacctgcagttagtggtcaactttctatccaggcagagtaaactaaggagagctatgaaatatcaaaagaaaactagaggccaggacaaagaggcaatgtcagccaagccactgcaagatggtatgcacccctgtatttcagccaaggggcaggcaatccaaattacacactgctttccttaacttgaccaaacagtg

SEQ ID NO: 924 - DNA, 344 bp, homo sapiens
ccgctctgcaaaccactgcgtgctttgcagagtgattatcagcacagttccctgccctggataaggaacagctacagtcgctgttaaatgtgcctgaaaagcaatttgcaatctttgcattaggcatttcggccgtggaaccccaggctcggaggactgggtgtgagcgctgcccgggagaggctgacctgccgggaccggagtgcccggggacgctgtgcccccacttgcccaacgtgcggaatcggctaagcgcgtcggcctgcgcggggcacaagggacgacgcccgcctttctctctccgagaaggatccccaaacctcactctcttcactcctccccgc

SEQ ID NO: 925 - DNA, 471 bp, homo sapiens
agtttgtaagtattccactctctactctcagattgagagccaaaactttaccttccatcaggaggtcaccctatctacaggcaagacagtgagctgtaccaaaggcactggccaaagtagggcccaggtcattattttcttttgagagagctctctagccctgattcccagttgtgcctccttaataagtacaacaccacccccaccaccccaccatgccatccatggaggttttgtgcatatatatcacagacttggattccattccctaagatatctttaggactaaggtaggtatatatatatattttcttctaagtgattccttcccaccgttttaatgcacatagtaagtggggagtgtgcaggctgttggtttggagaaacccaggcaaaagcacagtgactgtggcctgtccagattaaatctgttaagcagtaggttttgctaaatatggaggaacagtaaaa

SEQ ID NO: 926 - DNA, 554 bp, homo sapiens
aaagttgggaataactgtggtaacaggaaatattacactacaactgttctctagaaatctccaccatccccatccttcctcagcaaatgaaggtgggtgctttggatcctttctctgttcttagaaaggggaatggatgcttcgtatagagagctatgattcagacgcccatcagagtgccaagctccatgctgacaggcacatttggctacattcaacaaccctatatgagatacataaacggcacatgccattttcttctcctttgaaacgagtctccaacgcaaaggctttcacttttcattctctattttaactttaaataccaatgaaccccctggtgaaacctctcctctacaaacattcactcagacagtgatcacgccaaccgcaccacatctaaaaattacaaaggagaactttgtaccagctaaggacaaagaagctttaccttttactgtttctccatatttagcaaaacctactgcttaacagatttaatctggacaggccacaggtcactgtggcttttgcctggtttctccaaaccaaca

SEQ ID NO: 927 - DNA, 437 bp, homo sapiens
atcattttgtatgcattgagaaagacatttattatggtttttaagatacttggacatctgcatcttcagcttacaagatctacaatgcagctgaaaagcaaccaaattattttttgctgaaactagatgtttttacatgagaaatactgtatgtgttgtctaagatgtcagttttataaatctgtattcagatttcattctttgttagctcactttataatttgtatttttttactgtatagactaaatatattctatttacatgtatgtcaactcattacttttttcctgtgaacagtattgaaaaaccccaacggctgataattaagtgaattaactgtgtctcccttgtcttaggatattctgtagattgattgcagatttcttaaatctgaaatgatctttacactgtaatctcagcatactgattatgggag

SEQ ID NO: 928 - DNA, 442 bp, homo sapiens
  misc_feature (287)..(435): n=unknown
gatctgtaaaaggtgtcaatataatattgcctatacaggaaaaaattcaaatgtgaatagcaacaaataaaagttacacatcttcctacttagcagtgcaattaattcacattgcaataaagttaagtcaagtataacaaaatcaaaacaagtgtttctccataatcagtatgctgagaattacagtgtaaagatcatttcagatttaagaaatctgcaatcaatctacagaatatcctaagacaagggagacacagttaattcacttaattatcagccgttggggnttttcaatactgttcacaggnaaaaagtaatgagttgacatacatgtaaatagaatatatttagnctatacagtnaaaaaatnccaattatnaagtgngctaaccaagnatggaatctggntacagatttattaaactgcctcttagnccaccca

SEQ ID NO: 929 - DNA, 239 bp, homo sapiens
agttgggcattgtttttctaacctaacctttccctctggggtagagaagccgagagaccctgtcctcccttatgcactgtggcccagtccccttgcctttttcctgttctgtttggagtggagaagggcagcacctctgtgtttaatggaaatagcccatagtctcctggatttttggaacatctttctcagcctattttgtgtcctaatgattcgctcaataaacatgtttgaatcca

SEQ ID NO: 930 - DNA, 210 bp, homo sapiens
acacaaaataggctgagaaagatgttccaaaaatccaggagactatgggctatttccattaaacacagaggtgctgcccttctccactccaaacagaacaggaaaaaggcaaggggactgggccacagtgcataagggaggacagggtctctcggcttctctaccccagagggaaaggttaggttagaaaaacaatgcccaactctcgag

SEQ ID NO: 931 - DNA, 449 bp, homo sapiens
  misc_feature (7)..(7): n=unknown
  misc_feature (375)..(442): n=unknown
ggcgcantaacagacggcggcagtgcgagaaagccgaagatggcggtccccgcggcgctgatcctacgggagagccccagcatgaagaaagcagtgtcactgataaatgcaatagatacaggaagatttccacggttgctcactcggattcttcaaaaacttcacctgaaggctgagagcagtttcagtgaagaagaggaagaaaaacttcaagcggcattttctctagagaaacaagatcttcacctagttcttgaaacaatatcatttattttagaacaggcagtgtatcacaatgtgaagccagcagctttgcagcagcaattagagaacattcatcttagacaagacaaagctgaagcatttgtcaatacntggncttctangggtccananacagttgnaaagttccggcagagaattctggctcccctgtaagcnngagactg

SEQ ID NO: 932 - DNA, 411 bp, homo sapiens
  misc_feature (217)..(391): n=unknown
ttattgcaggaatatttcaagtgccatcaaatatttatagaagggttaaaaaaatagaagtctctctaaagtggtccagacaaggctttgtatagaataaatctttttttccccatcttctagttttgatttaagtattttgaatacattttcttttccattgacacttagtagcctagaagcggtccgacgcacacacatcatacacatgcaaatnnnnnnnnnnnnnnnnnnnnnnnnnnnnnnnnnnnnncttcctcacctgaccctcagcccacccccatacgctcacagatanctgggtatccacactataaggnaccaccaaacttagaagcagtgtcttaagncatggttttcttnagttagaaagggtgaattaggatggcnnaagactttaaaaaactcgag

SEQ ID NO: 933 - DNA, 452 bp, homo sapiens
cttttacttataaggcaatttggtagacacaacatataacaatgtgtacatacaaataaacacatctagacatgtatacacacacataaacgaagattcaatagcttggaaccttagccatgagatagcaatacaagcttgccagtttttgccccaacagataatccaatgaaggctgtgaaccaaaattttggctaaagcagtctccatggcagtttgatttttaaaggccaaacctcccacgacttcaaagcagggtgtcacatgttaaccaggccccctgcttagagctgcagcacaaaagcctggatacatgcaactctattccactttccaattcaacagtaaacttcagattccaaacaatgttggggccaaacagcattgcaactgcggagagaaaattctaaggagggctagacctcagaacctctgccaagagcatcctcttt

SEQ ID NO: 934 - DNA, 553 bp, homo sapiens
aggacagccccacagtacttcagaatatcaagtatgtagtaagtcttgttagctgtgacagtgacaaggcaacagctaaaaaaaaaaacaaagcagtgaaacaaacatgatttccttaaaattataaaacaatactgatactaaagtttcattaattattgcaacagtaaagaatttaatttaccaatatttcatgttaggaaggctctttatgaaatttattcaagttgtcaagaaattggatgaaaatataaaaaaggaaatacatgtgaattttacttttgattttcactcaaaatatccatacaattttatacagtgtcgcctaacataacaatctctaataaactcaagtatacagaaatgataaaaatgcaggaaattttttacactttcaaatgaaaggatagcaatttatgacacgaagttcgtgtaacagatgcggaaatgaataaagaaatcaacatcagtgagacagtctccctctactggaggggcacgttcttatagttcgtaactaggtctgagttccaaggtaacagttgcatacgag

SEQ ID NO: 935 - DNA, 471 bp, homo sapiens
caggcccagcctttctccactgccacgtccctcatgcacatcactcatctcctgctgcaggccaaggccaaaattgggctagtcctggccagggaaatcagaagctcttcttgggtgagattgagcctcctgttgctccctggagttccggaggctgggctgcagcccactcagcttgcgggcaaaatacgtgctctcctctctccttgtcagctgagcaaacccagggaatagccctcctctccccaggaaacttctctgaaatcttagacttagccagtcttaggcctacgatgccacacaaaggttgttcagggagaagggggtgcaggaggcagagggtgccccgcaggagctggtggctccagccccactagagctcctaaagatcacacagcagctgctcctgacagggatgctcatgcccagaaagcaagcccaggagaggaaggcagagtgtgacagagcaga

SEQ ID NO: 936 - DNA, 268 bp, homo sapiens
  misc_feature (39)..(264): n=unknown
aggtgctgggcatatgtctcccatttcatcctcagaaancagctatgacaagaaaggccccgcctttcctgntaattttcacgatgtgaccactgccctgngaacttcccacccacatgactgatttgggctccangatgtanaanggcatctatatgggcagttctngacttctgcctnccgtggcacttctctggagccccananangnctctncngntgcgcntnnccntggcnctgctctgnnanactctnccttccncncctg

SEQ ID NO: 937 - DNA, 514 bp, homo sapiens
gccgggagtacagacgacgtcaccgtatatcttcttttcggccagtggaggatatcaccgaagaggacttagaaaatgttgccataactgttcgagataaaatctatgataaagttctgggtaacacgtgccatcagtgtcgacaaaagaccatcgacaccaagacagtgtgtcggaaccagggttgctgtggtgtgcgaggacagttctgtggaccatgcctgcggaaccgctatggggaggatgtcagatcggcattgctggacccggattgggtgtgtcccccctgtcgtgggatctgcaattgcagctactgtcggaagcgtgacggccgctgtgccacaggaatcctcattcatctggccaagttttatggttatgacaatgttaaggaatatctggagaggtaagtaagtctctagcagcttacaaaacagcttgaaatcttgaggctgagcacaggagaccctctgggcaagtagtgttgcttcccgtgtgacttacttacttatat

SEQ ID NO: 938 - DNA, 121 bp, homo sapiens
  misc_feature (42)..(100): n=unknown
gtccgagagcgaggagcgggaaagaggatgggtctgcacggngagtggaaaggcaggctgtgtactctggggaaagtggagcaaggaaggagctacagnngccgacgctggaggtcggctg

SEQ ID NO: 939 - DNA, 379 bp, homo sapiens
  misc_feature (9)..(9): n=unknown
  misc_feature (182)..(182): n=unknown
  misc_feature (365)..(365): n=unknown
gtgattgtnctgggcctgcagagcaaggaccaggctgagcagtggctcagggtcatccaggaagtgagcggcctgccttccgaagagcatctgaaggaaaccagtacaccccggatgcccagcgctttaactgccagaaaccagatatagctgagaagtacctgtcggcttcagagtatggnagctccgtggatggccaccctgaggtcccagaaaccaaagacgtcaagaagaaatgttctgctggcctcaaactgagcaacctaatgaatctgggcaggaagaaatccactcactggagctgtggagaggtcctcgagacatccagttactgaacgtgctggtgaacaagccagtggaagtcntcgctggtgctctg

SEQ ID NO: 940 - DNA, 368 bp, homo sapiens
  misc_feature (39)..(39): n=unknown
  misc_feature (194)..(329): n=unknown
tttgctttatttaagctaggctagcctccaagctggaantgaattgacagttgaaaaataatgacatgtatacaaggtatgtttgaaggattgcagatgcaggggcaccatatgctaaaggagtgttggaagctcactgcagaagatgacaaaagcagactgatatgtattatttgctgaaatataagctggangcacaggtgaagattgccaaacctaatgaacagtttggcaaataagacaggctgtcaggccatggcagttcagcagtnggcgtgctgcctgtgaaccaagtcatttgttccagaggactacacttaaataccacnaataaaatcttccttgtcactgatatcacagttgaatag

SEQ ID NO: 941 - DNA, 423 bp, homo sapiens
  misc_feature (266)..(266): n=unknown
  misc_feature (412)..(412): n=unknown
ggaaaagaagctgatcggctgtcctgtgtgcatcgaacacaagaagtacagccgcaatgctctcctcttcaacctgggcttcgtgtgtgatgcccaggccaagacctgcgccctcgagcccattgttaaaaagctggctggctatctgaccacactagagctagagagcagcttcgtgtccatggaggagagcaagcagaagttggtgcccatcatgaccatcttgctggaggagctaaatgcctcaggccggtgcactctgcccnttgatgagtccaacaccatccacttgaaggtgattgagcagcggccagaccctccggtggcccaggagtatgatgtacctgtctttaccaaagacaaggaggatttcttcaactcacagtgggactcactacacaacaaatcctgncctacattgat

SEQ ID NO: 942 - DNA, 542 bp, homo sapiens
  misc_feature (471)..(507): n=unknown
tcaacctctagacagtatgacaagcctcctagtaggagggactacccacagcaatgtgtccatccagtcactaccagcctcacttccagcagatgatgatgttggggtcattttcaagccgctcatccagctcatggtagctcatgcctgtcttgcagcagatctcgtcatagctgtggcagcctgtataaagccgggcagggtggctctgctcttcccgagtcacccgcacaggatacttctgtagtcgcctgatgaggttcttcataagcccgaactggatcagcttccgttcatcaacatgctgcagctgctgggggtggcggccaatgaggtctcgcacggtagtccaggggctcaggctgcagtatagctggaacacatcccggagactggccctcttgtgcccttgcttggtcacgtaggatagacatgctcttgcagggacttgtcatctaccaggtcctggancttgggcgttgggcagtatacattggagtactggangatggacaccagtgtcacaacgccgtagtacagca

SEQ ID NO: 943 - DNA, 352 bp, homo sapiens
gtagcattctaaaatctgggactactagtgagagtggagccttatccttggaacccagtcatataggtgacctgcagaaagcagacaccagtagtcaaggtgctttagtgtttctctcaaaggactacgagatagaaagtcaaaatcctctggcctctcctacgaacactttgttaggctctgccaaagaacagagataccagagaggcctagaaaggaatgatagctggggttcttttgacctgagggctgctattgtatatcacactaaagaaatggaatctatttggaatttgcagaagcaagatcccaaaaggataatcacttacaatgaagcccatggatagtccag

SEQ ID NO: 944 - DNA, 453 bp, homo sapiens
  misc_feature (180)..(180): n=unknown
tggggctccctgggctgttctgcttggccgtgctggctgccagcagcttctccaaggcacgggaggaagaaattacccctgtggtctccattgcctacaaagtcctggaagttttccccaaaggccgctgggtgctcataacctgctgtgcaccccagccaccaccgcccatcacctatnccctctgtggaaccaagaacatcaaggtggccaagaaggtggtgaagacccacgagccggcctccttcaacctcaacgtcacactcaagtccagtccagacctgctcacctacttctgccgggcgtcctccacctcaggtgcccatgtggacagtgccaggctacagatgcactgggagctgtggtccaagccagtgtctgagctgcgggccaattcactctgcaggacagaggggcaggcccagggtggagatgatctgccaggcgtccttc

SEQ ID NO: 945 - DNA, 505 bp, homo sapiens
  misc_feature (399)..(497): n=unknown
aatacgaacagtgcacgctgatggcctgcagtcctctgccgtgcttggctctctggacggttcattctacatggctgctgctttgcgtcctctgacctccccattccctatcctgaaccccccaaactcctcttcactcagacggcgggtgctcctgtagagcggcaaggcaaggatggggctctccaggggaccctgccagtcctccatcttctggtcaccacctggcccacgtggtccagcccagcatcctggaggtgatggccgcagtggaggcaaggctgccaaccagcacgatggtgggtgccctgggcaaccctcctgggggcaccactgtgaaggcgctgtgctggacattggcgttgtttgcagctggcaccagaaccagtccgatgtctngctcggcaggaaggagaagttngcagctgcctgtggcatggtctctgctgcaagtggaactgcccatcctttccgattaagcttnttggtganaagtngggttgcc

SEQ ID NO: 946 - DNA, 513 bp, homo sapiens
gggtctgtgacagggtccaacagggcctggtccgtgtccggtcccccaaatctgtcgtccctgcccccaggcattggcatcaacaaaagtcagaattcccgggaacttgaacagaggctgctaaattcccagtaattgctcctttggccttctagggactgacttcaaagaaggaaggaaagaatcagtgcttcctcattctcttttaaaacccgcttcccgctgagtctgcacccaggagaccagagagcaccttgcccttccatggaaactcaggctgatctcgtatctcaggaacctcaggccctgcttgacagtgctcttccttcaaaagttcctgccttttccgacaaggacagcctgggggatgagatgttggcggctgcgctcctaaaggccaagtcccaggagctggtaacctttgaggatgtagctgtgtacttcatccggaaggagtggaagcgtttggaacctgctcagaggggacctctatagagatgtgatgctggagaa

SEQ ID NO: 947 - DNA, 513 bp, homo sapiens
  misc_feature (31)..(31): n=unknown
gcggacgtggcgggcccctcccgccccagtnccgcggcgttctggagccgggacttttctgatgaagaacaatcagtagtatacgttccaggaatttctgctgaaggaaatgtcagatcaagacacaagctgatgagtccaaaagctgatgttaaacttaagacttccagggtgactgatgcttcaatctccatggagtccttaaaaggcacaggagattcagtagatgaacagaattcctgcaggggagaaataaagagtgcatcattgaaggatttatgtcttgaagacaaaagacgcattgcaaacttaattaaagaactggcccagagtaagtgaggaaaaggaagtgacagaggaaagactgaaagctgagcaggagtcatttgagaagaagatcaggcagttggaagaaccagaatgaactgatcatccaagaaagggagcttcctttgtgcctgataaggccattccagctgttctgctgctgctgttaagctgctaagcacatac

SEQ ID NO: 948 - DNA, 542 bp, homo sapiens
  misc_feature (473)..(473): n=unknown
ttcctaggactgtcaaagctttaactagaaagaataccaaatacaaggaggttccagctcaattacagcagtgcaacagaatttaataaagttccaacactacacttcaatgcccaaatttcttcttgtcctttttagttgacaagtatgtgcttagcagcctaacagcagcagcagaacagctggatggccttatcaggcacaaaggaagcttccctttctttgatgatcagttcattctgttcttccaactgcctgatcttcttctcaaatgactcctgctcagctttcagtctttcctctgtcacttccttttcctcacttactctggccagttctttaattaagtttgcaatgcgtcttttgtcttcaagacataaatccttcaatgatgcactctttatttctcccctgcaggaattctgttcatctactgaatctcctgtgccttttaaggactccatggagattgnagcatcagtcaacctggaagtcttaaggttaacatcagcttttggactcatcagcttgtggcctgatct

SEQ ID NO: 949 - DNA, 328 bp, homo sapiens
ttttaatattattgtacatgaaacaaagtttgtgtacattgtaccataagaaagtaaaggtgttattttctcagccaccaatgtggacaatctgtggttgcatggcatcaccatcattcctgactctgaatttatatgttaccaataagcaatcattttcttacacttattcacacataaactgtgtgttgtgtccctgccttttgactgcaactatcaagtagaattttccacttgtggtttatgtctgtgctgaaaatgtcttggattttggagcattttggatttcagatttttgaattaaggatgcttaacctttgtgtatgat

SEQ ID NO: 950 - DNA, 508 bp, homo sapiens
  misc_feature (453)..(453): n=unknown
actaggatgcttaaaggaacagtgtctcagacaccttattctcataaatcaatgcaccatctgaaatacattccatctagagtagccaaaggctgtgtcccttgtgtgatctaagagctctagctcaaatttgatcaaataaaaaatgacagctgctcagcttggcccaaatatgcactatttcatcatatattcagatatctcaattttacagattggcttacttagcactatagacatcaactagagtaaggtttaagggaccaagtgaatcctaaacctaagcatacaaatgagcagcaaatggcataattgcacatatattagttaggcttcttttcaagaaactaattttgaatttatttatgttttatcagcaaggattaagtcaagcatgctgacaccattatgaattaacctcatctaaccttcaaaatgtgtggattccatttnaaacctgtagtctatcaactatctccaccaattcaacagattataggctggtgga

SEQ ID NO: 951 - DNA, 424 bp, homo sapiens
tgaaagccttgcacactcacctccaccttcacaggccatttgcacacgctcctgcaccctctccccgtccataccgctccgctcagctgactctcatgttctctcgtctcacatttgcactctctccttcccacattctgtgctcagctcactcagtggtcagcgtttcctgcacactttacctctcatgtgcgtttcccggcctgatgttgtggtggtgtgcggcgtgctcactctctccctcatgaacacccacccacctcgtttccgcagcccctgcgtgctgtccagaggtgggtgggaggtgagctgggggctccttggggccctcatcggtcaatggtctcgtcccaatccacaccatttgtttctctgtcttccccatcctaactccaaaggatgccggcatcaaccctgaagggct

SEQ ID NO: 952 - DNA, 504 bp, homo sapiens
  misc_feature (128)..(177): n=unknown
  misc_feature (304)..(304): n=unknown
gtaattcaagatgatcaccacaagaagaagaaagagataatacaaaaatatatatcacagcctaggagccagggaagaagggaaggaggaaggtggaaaaaccagtgagaaggagggaagaacctgangngggggaaagggcagggaagcaaaaggnaggagagtggaagnnaggnnggaggaaaggaggggacaggagggagtccgggaagggaagggtagacttggaggcagagctcccgatggccttgaaccagctgactccggtccctggcagcctaggtggagttagggaggcccaaanggaggctgggaagggaggactggctcagggggctctgaagtccagagaatggcacacacacagacagccaggacagacaagacaaaagggactgtaggagaaagggaagggcaaatgggagtccctttctcatgtagtgcagcaggcgactccccaaaacccatctgtcagaaaacagattttagcagtgggcttggggt

SEQ ID NO: 953 - DNA, 482 bp, homo sapiens
  misc_feature (15)..(479): n=unknown
cagcggcgggcgatnggacccaggcngccccgccgtacccgcctgcntcccgcgctcccgccccagcatgacagccccggcgggtccgcgcngctcanagaccgagcggcttctgacccccaaccccgggtatggnanccangcggggcattcaccggcccctccgacacccccagannaggaagaccttcgccgtngtctcaaatanntnttcatgagtccctgcgacaagtttcgagccaagggccgnaagccctgcnagctgatgctgcaagtggtnaagntcctggtggtcacggngcagctcatcctgnttgggctcagtaatcagctggctgtnacattccgggaagagncaccatcgccttccgacacctcttcctgctgggctactcggacggagcggatgacncnttcgcagcctacacgcgggagcagctgtaccaggccatcttccatgctgtggaccagtanctggngtt

SEQ ID NO: 954 - DNA, 385 bp, homo sapiens
taactcagtacactaagagtgatttacatgcctgcaaataatttgtgtctggggtcttgaccctccccaaatgccttgttatttatatctctgcttttagataacagatggtcatgtgtctatgggcttgtaccggcagaggcaacagcaggtccttaagactccccaggtgccatgatgaaaagaaccttagaaaatattgaaataatctcaaaacttaaaaaaaaaaataccagaaataaaagctagtaaaggtgagaggtgtggggcttttggaacatagagcataataaatcagaataaaaagtaaaaataagaaagagaaaaaagtggccctgattaaattataaaattaagcatatcttggaattctaacgagccaaac

SEQ ID NO: 955 - DNA, 227 bp, homo sapiens
  misc_feature (9)..(224): n=unknown
gaagaaagntaactcaggacactaagagtgatntacatgcctgnaaagaatttgtgtcnggggtcttnanccnccccaaatgccttgntanntatatctctgcttnnngataacngntgggcatgngtctatgggcttgtancggcagaggcnacagcaggtccttaagnctccccaggngccatgatgaaaagaaccttagaaaatattggaataanctcaanact

SEQ ID NO: 956 - DNA, 508 bp, homo sapiens
gggaggacagctgaatcataggttaaatgtatcatcatctttctcatactcatcactgggagaacaaggtttcctgtcatccttccaattagctgtttaactcatttgcataagaatcattcctgaaacttgacctattgccatcaaatttgtgtagattgaaatccatttttccagcttctggctttcagggcctgagttttatttgccaagttagctcctgcatttagtgaagaggttatttttctttaaagtcaccagaggcataaaaaagccatagcgattcttgcagggagggtgccacttcgggggaatagctgggttgtgtaaggttggaagccctaaagagccggtagcctaaggtcttcaaagatttctgagctgctcttgattcgtgtgtatgtttagtgaaagtttgttttcagtgcctgtagctgataccactgactctgtgagtaagagtaagctctctggatctcaggtttccctctgcaaagtgagctggact

SEQ ID NO: 957 - DNA, 274 bp, homo sapiens
  misc_feature (42)..(262): n=unknown
atggaagtacttcttactgatgattacattttttaaaatcangcctgccagcccatctaagccaaattcaaacaccactctgcattaaatnnanctgcagcaggaaagctgagcacatagcacccaactgatcggaaagaaacgtaccangtttaatanaattccagattcctgtggtcgttgnccataaaaatgctttncagtgttggatatatggttttgcaaaagcaagcaaatcctccacagttccgtatctgactgntgaacaaccatg

SEQ ID NO: 958 - DNA, 488 bp, homo sapiens
  misc_feature (438)..(438): n=unknown
cagcaatgcgttcccctgtgtttatcttcaggagacacctggagcacagtttggggtggagatgtgtgtgtgggcgggtgtaggaggtgagtgaccttttattgaactatgatgaagggccagtcactgtactaaaccctttccacattttccttcacttagtcttcacgatagcctcatgaggtaggaacgggggtcacctcccattttacagacagaggcttggagagaccacatgacttgcccacattgtccacctaaaatgcccaggatccaggcttcccaacccactgctgagacttacactgtctccgggcacatgggtgaggtggtggggctgaaaaggaaacccagcacttgaaagtctgtgggcacaaatcccgtgcagtcccaccggcaagcctgagcccagccaggagatgctcccactgtgagcgnccgaacatctgtgcagtcaggtttgcatctaggaggacggcacacagcgt

SEQ ID NO: 959 - DNA, 489 bp, homo sapiens
cttcttccctataaaaagatactgagagctccataatgaaagaagttgttatactttctcagaatattctggaccactgaatgcacttctaatagagctttaatctaaagaagttagttcagtggttattaactgattttattacaggagaaaaaaactttaacaaaaaggcagggagaaaagtgtgaagggcatcaagcaaaatgacaggggcttcaaaaaacaaccaaagacaaaaccctatcttctgaagaccaaaggtccaactttacttactggctggcacagctttctgaactccttgagtttagaatagagctcctagaataataaggcggccaaatttaaagatcagtcaatacagtagggacctgctattgatctctcaggcactgagtcttcacatccagtgtcaagcccagcccagcatatggggtgatatgagcagaaaacacacatcggtgtgtcttgatttctcgcagctgtgta

SEQ ID NO: 960 - DNA, 245 bp, homo sapiens
  misc_feature (89)..(216): n=unknown
cggggcgtggcgggcggccctccgtgcccatgattcaggggcacagctgccccagcagacacacactttcatacgcactcacaccccanccccaganacacccccaggtctctggaactggcccagggtcctgctgctctcananccgcaggacanggctcaagggctaccctcacccccanccggcttcctagcgngctggntgcccanggcccntcttggacttcttggtccctcagggggga

SEQ ID NO: 961 - DNA, 439 bp, homo sapiens
  misc_feature (384)..(384): n=unknown
gggtagaggaagccgtgaggcggagcttaggtcgggaagggatggatcgctgagccgatagcgtccgctaggctgtctgcctcggtacctgttactgctgctacttcctcgtttgacaccttcctggaatctctcttgatttttgaggaaatacctagtaacaaacatgactgagttctggcttatatctgctcctggggagaaaacctgtcagcaaacatgggagaaattgcatgcggcaacttcaaagaacaataatcttgctgtcacttccaagttcaatattcctgacttaaaggttggcacgttggatgtcttggttggcttgtcagatgaactggctaaactggatgcatttgtagaaggagtggttaagaaagtagntcaatacatggctgatgtattggaagatagcaaagaccaagttcaagagaatctg

SEQ ID NO: 962 - DNA, 566 bp, homo sapiens
ttagtacacatttacagacctgatcaataaaaagaaactatatatatatattttttcctttaaaaagaaaatgttgagatacagaccactgtgggagaattcacctaggaaagggggtaagaagcaagcaaaggatactagagttaaaagtacgaccatactgcaacttatttctgttagcacacacaaacacaaggacaggattgtcgggggaggagcccattttcacttgaattccagcaagttgcaatcaatcttgtagtacacataggggtagtattcttgttgactcaggtttaaacctggaatatccataggagcatcaataatagctgctgcactgctgtctagatgtttatacaattcatgtaatacttctctcagtttcttcaaagttttcttattgggctgaagtagcattgcttggaagttcactggcaagccataccttaaaacagactcaacgaaaacccgtaatgctttcacgtgaatccatgcaataaatgcttcactaaaattcactttcagccaccgtacaagtggtccaaattggttttttcttatca

SEQ ID NO: 963 - DNA, 407 bp, homo sapiens
  misc_feature (218)..(218): n=unknown
gaaatgctttataggatttagagcctaagtaggagcatggtgttcttgtaatagcaatccaaatctgttattttagttgttaagggagaaattctttaaaagtcttcaaagaaattagagataggcattaatttattaaacagtgataatagaggttattggaatctattttgggaaactttaagtcatttggtattgggaagagagtacttcaaggntaatttgtataaatttaattttgttataagaggctgtactctgtttgcactctagaattaggaaggttactttcctgacttttgtatttctcaggaaaaaaagaattggaagaaacttaagaggtctgttaatgccagtacctaaacgtgacatttaacatggcatggaagctatgctttgaataaaca

SEQ ID NO: 964 - DNA, 469 bp, homo sapiens
  misc_feature (149)..(447): n=unknown
cactgtatgagacacaacagaatattttttcttccagtattaaaaaaaaaaagacatttgcaaacattttaaagccaactcttctatataatcagtttgatgatctgaattagaaaatacccctggataatcatgttcttgatacacannnnnnnnnnnnnnnnnnnnnnnnnnnnnnnnnnnnnnnnnnnnnnnnnnnnnnnnnnnnnnnnnnnnnnnnnnnnnnnnnnnnnnnnnnnnnnnnnnnnnnnnnnnnnnnnnnnnnnnnnnnnnnnnnnnnnnnnnnnnnnnnnnnnnnnnnnnnnnnnnnnnnnnnnnnnnnnnnnnnnnnnnnnnnnnnnnnnnnnnnnnnnnnnncttgatgcacatttcttataggtacattggggaattgcttcctaaccacaataaacactggtgtacagggttttaaaaatngtccctggntacacattaattttttgaagtc

SEQ ID NO: 965 - DNA, 464 bp, homo sapiens
  misc_feature (6)..(10): n=unknown
atcgcnancngccgcccttttttcccttagagatactatttactatctcctatcctgataggtggaaggtttactgaattggaaattggttgactattagtttttaactaaaatgtgcaataacacattgcagtttcctcaaactagtttcctatgatcattaaactcattctcagggttaagaaaggaatgtaaatttctgcctcaatttgtacttcatcaataagtttttgaagagtgcagatttttagtcaggtcttaaaaataaactcacaaatctggatgcatttctaaattctgcaaatgtttcctggggtgacttaacaaggaataatcccacaatatacctagctacctaatacatggagctggggctcaacccactgtttttaaggatttgcgcttacttgtggctgaggaaaaataagtagttcgaggaagtagtttttaaatgtgagcttata

SEQ ID NO: 966 - DNA, 455 bp, homo sapiens
ataattacagatttgatgaggaatctgcaaataataaagaatgtgtctactgccagcaaaatacaattattccatgccctctcaacatacaaatatagagttcttcacaccagatggctctggtgtaacaaagccattttagatgtttaattgtgcttctacaaaaccttcagagcatgaggtagtttcttttacctacgatattttccacatttccattattacacttttagtgagctaaaatccttttaacatagcctgcggatgatctttcacaaaagccaagcctcatttacaaagggtttatttctttctactcaatttttcttaaaaagaatttcaagaatcactacacagctaagatatctgagacttgcaatggctggagtctatcagtacaatagtaattgcaatcagattcagatacaagagaacaggttctaacaatttcataa

SEQ ID NO: 967 - DNA, 557 bp, homo sapiens
  misc_feature (544)..(544): n=unknown
tgactgtgtcttaatgatctctgtattcttagtgacatgtagaatcattgtgcctgacacatagtatgtactcaggaaagaaatggaaaatgtggttttagcattgaaggccgggagagagggtctaacagactacaagccctgccaggagcagagtaagggaaacagaggagaaaagtgtttttagtctgtgcctgaatgtatttacatctgtttgtagcccaaaagccaaaagcgtacatacgcttggcttttctgtagctatgtttatggctttacagcagattttatggagctgcaattactttgatcatgagggactgatgctagtggatttacttcaccaaatggaactcactttgtggcttctgaagaagggacctttgtggactgtcatggagtagttaagagtgcaggctctgatttagtgatcagagtctgcattgtcaggaatgggacaaagtgaagttatgtggcattgataggatgccctgagaagttgcaacatcacccctggtgataattcctgctgaagatccataanctgggatgtaatc

SEQ ID NO: 968 - DNA, 491 bp, homo sapiens
ctctgcagccactgaggcctgtttctgtggccagagacaccgggcatcaatgttgacagaaggcctagcctggctcctcctagctttaatacctcctcagtgtagggactgctattcctatctcagatgaagacgctcaagctcaggtggcaggagtgatttgtccagtgccacccagtgaatcagctagagctgagattcaaagctaggttcgtctgcctcatttgggcaacggctgctgcctctacaggccagtggaaggagtgtgcggatctcaggcattctttcttcagtcagagcattcattcctcaagccattcacacatttaggcctcatgcttttttctgtctttcatcacatccatttcctacactcattgagaggtaatctagcattgtggtttaagggggtatgtgggtggttaatgaagtctggcttagaatcccagctctagatgaaaatgtattgacttggagagcaaagagagctg

SEQ ID NO: 969 - DNA, 189 bp, homo sapiens
ttcttaaaaacaatgcctccactccaaataaatcacagtcaaaataaatgaagagctcaagatgacatcagtcccatttgtcttaagtcctggtgttgtgtggatgacaagcagaagccagttatgatgacaggtgatagatccaaaataattgccacatttgttaacatttttccatttctactcgag

SEQ ID NO: 970 - DNA, 58 bp, homo sapiens
gaagctgtcagatggcaggcgaggtgttccgagggacttgagcataatcgtgcaagac

SEQ ID NO: 971 - DNA, 510 bp, homo sapiens
  misc_feature (334)..(489): n=unknown
gaaagatttaaaaaattattcctactaatttatgtcctccggcttccccttggttacctctgtggggtaaactgaatctgtatccccatttaacaggtgcaaggagatttcctgggggctgcacacactgtgtgcagcatattgcaggctttcactcatttaatatctacaaagtcctcaataagtatatgaattacttatgatttccctgttttttcttcctataaggaagctgaggcacaagttaatcaaagtctcttggcctagggtgacacagctaagatttgtacctagagatttctgagtgttgacttctctcctgcccccacctatnnnnnnnnnnnnnnnnnnnnnnnnnnnnnnnnnnnnnnnnngaacataccagggattcatggcttgcccaatgttgnctcnggagangagaggagagggatgagataagctcctcccacccggctgactcgctgtgtgtctcttttctcaccccanggctggccatgtcccctttcg

SEQ ID NO: 972 - DNA, 469 bp, homo sapiens
ccttcacaggactcttcattgctggttggcaatgatgtatcggccagatgtggtgagggctaggaaaagagtttgttgggaaccctgggttatcggcctcgtcatcttcatatccctgattgtcctggcagtgtgcattggactcactgttcattatgtgagatataatcaaaagaagacctacaattactatagcacattgtcatttacaactgacaaactatatgctgagtttggcagagaggcttctaacaattttacagaaatgagccagagacttgaatcaatggtgaaaaatgcattttataaatctccattaagggaagaatttgtcaagtctcaggttatcaagttcagtcaacagaagcatggagtgttggctccatatgctggtgatttgtagattcactctactgaggatcctgaaactgtagataaaattgttcaacttgttttacatgaaaagctg

SEQ ID NO: 973 - DNA, 592 bp, homo sapiens
  misc_feature (215)..(346): n=unknown
acaatgttaaataaatatttgctttaatttgcttagaacaagtacattgcatgaagtttgtataattattataggtcacaaaaaaacagaatcttcttcacatttatcatagtagttgtttggaaatgaaaataaggatatatcttggcttctttctggacttccttaacttagttcccatacttcctaaatgatgaagtgattggtattctgcngtctttgcttgacctttcataatgaatatgancatttctaanattccactaagaaaaacaccnaanacgtttctgtgccaataaaatgtaggggattttttttcttcttagattttctttcactccttgtnctgcaccttgaaaatggatatttgctgaaatgagaggagctgaggaactgaagaaaaggagtgcttcaaattgtatatatgcattacaaatttatgtcaacaagtcaaaattctgacaaaacttctagagaacaaatgaatacaggctgtaatgtaatattgtattatctatttctctatgtacataaagtttcaactattgctcacagatgacagagttgatctggcagaagcaggatgcttacg

SEQ ID NO: 974 - DNA, 317 bp, homo sapiens
aacactaataaagatatgtttcctagtaaaggatgtatttcactcatggtactgtaatgataaatcccattttcaggttaagactgcatctggagtattgaaacttggagccactttctaagagggtaaataggaggataagaagtctttaaccatttctattgaggataggctgctgtaattactgtggaaaagagaaggcttactggggggctatgagaaggcagaagtagaacatttgttctacttgggtgatgaattagaagtggaaaaagatgagaggcaaagacaaagacagctcctagaattgaagcctc

SEQ ID NO: 975 - DNA, 576 bp, homo sapiens
  misc_feature (206)..(334): n=unknown
  misc_feature (472)..(472): n=unknown
atagtggctccaattctttatacctagttagaaagaatatatcaaggaatactttccccacaaattatccatcagaaagttgctcaagagtcttctactcttttatcccaagcaggaatccttagtccctggtatggagccacctctgctaaagtactcacagcgtttgggaactcacttctttgcacggcaacttacaccatgcntggtgtaagaggcntcaactctaggagctgtccttgnctttgcctctcaccntttttccacntctaactcaacacccaagcagaacaaacgttctacgtccgccctcncanagccccccagnaagccntcacttttccacagcaattacagcagcctatcctcaatagaaatggttaaagacttcttatcctcctatttaccctcttagaaagtggctccaagtttcaatactccagatgcagtcttaacctgaaaatgggatttntcattacagtaccatgagtgaaatacatcctttactaggaaacatatctttattagtgttctcgagccggaatttccgagcttacgtaacgcgtgcatgcgacg

SEQ ID NO: 976 - DNA, 324 bp, homo sapiens
  misc_feature (144)..(295): n=unknown
gcttgagcggaagttagaagcaaaaatgatcaaggaggaaagcgactaccacgacctggagtcggtggttcagcaggtggagcagaactggagctgatgaccgtatgggtttcttctctgaatcggacgagctgggtggggcangagcgctcctgagaaantgctgttgtcctcagcagccggtgcagcctgcccttgggagcggggncatgtggctctctgggactggtgttctttgacgtcgctgtctcgctgtgcctggggataactggcccacgaaggcatccgtnggganttgggggccagagcacagacactgcacga

SEQ ID NO: 977 - DNA, 469 bp, homo sapiens
ggtactaagaataacacagatcctattattctcaacctctaaattcagtacatagtaaaattcattttctcaaactaaggttctatacataatcggagtaaaccctctgttactgagttaggatagggaaaacaaattccttagagttcatgaaaccacttcacaaatcctagaaggcacacattatatttcctatcatagtaagtacatttaagtacttcatatttaaaaaagacaaagctgtacagaatacaaaaagtgtacatttcatccattaaacaaatttacaacttttacgattagttattacagtagaactgacctaacattcacatctaaataattatcacccagttcaatagagcgaacaaagagctgtgctcatttatttatttgataaggctaataacattttatattcacagtagatcagtaagtgtcttgggagctcatattgtaaaataaaaag

SEQ ID NO: 978 - DNA, 509 bp, homo sapiens
  misc_feature (386)..(386): n=unknown
ctccaagccggaggggtcctgaggtgacagcgcctgcaactgaaatttcagcagcgggagaagatggacaagagaaagctcgggcgacggccatcttcatccgaaatcatcacagaaggaaaaaggaaaaagtcatcttctgatttatcggagataagaaagatgttaaatgcaaaaccagaggatgtccatgttcaatcaccactgtccaaattcagaagctcagaacgctggactctccctttgcagtgggaaagaagcctaaggaataaagtcatctctctagaccataaaaataaaaaacatatccgagggtgtcctgttacttccaagtcatcaccagaaaggcaactcaaagttatgttgacgaatgtcctatggacggntttaggacgaaaattcagaaagaccctacctagaaacgatgctaatttatgtgatgccaacaaggtgcaatcagactcattggcttcgacatctgttgacagctaggagacatgtcaaaatta

SEQ ID NO: 979 - DNA, 539 bp, homo sapiens
ctttactttcacatatcctttcaaagtaaaataaaataatttatttataacaaaaattattattaatacaataagaaaaaattcaaattccaacagttttctaaggttcacaaaccttcaggctgagtatcagatattaaaagagaaatgccatcatcctttcttcgtttttctttattgtgcgcagtctgctttgcagaattgtcatctactgtcttacttcgttgtgagcccctttcagataaataacagctcttgtgagggtttagattttgataagattctaggctgccatcagatgatgaagaaagttgctctgattgcaagttgtctgtatcactcaaacttccctcagttacaggtggggtccttatgtattttcttcctaactccgttcccaggacattcgtcaatataactctgggatcctttcagataaattaaggctttggcgaagaggttctaatttttgacatgtctctaggctgtcaacagatgtcgaaggcaatgagtctgattgcaccttgttggcatcacat

SEQ ID NO: 980 - DNA, 519 bp, homo sapiens
  misc_feature (303)..(303): n=unknown
  misc_feature (458)..(490): n=unknown
aataaatatgcaacagacagtgatctatcaagctagccaggctcttaactgctgtgttgatgaagaacatggaaaagggtccctagaagaagctgaagcagaaagacttcttctaattgcaactgggaagagaacacttttgattgatgaattgaataaattgaagaacgaaggacctcagaggaagaataaggctagtccccaaagtgaatttatgccatccaaaggatcagttactttgtcagaaatccgcttgcctctaaaagcagattttgtctgcagtacggttcagaaaccagatgnagcaaattactattacttaattatactaaaagcaggagctgaaaatatggtagccacaccattagcaagtacttcaaactctcttaacggtgatgctctgacattcactactacatttactctgcaagatgtatccaatgactttgaaataaatnttgaagttacagcttggtgcaaaagaaagatncctcagggcttgataaggaggaaaaaact

SEQ ID NO: 981 - DNA, 489 bp, homo sapiens
  misc_feature (261)..(440): n=unknown
aaatatatttttataatatgcacaagaaaaaatacatttgaatgaataaaaaataaaatgacaggaggtgacagaatttagtgtttataaatgaggtcataaagaactttaataattcagagaagaagttcaaagtgtatttaaaagttgagaccctgctttacaatattttataattttaaaaaaaggcgtttaaaggtgataggtgacttaataattttccactttcaaaatgggtttctagacactgttgttcatganccnnnnnnnnnnnnnnnnnnnnnnnncaacaaaacccnaacactttggcaagcaaagtattattagtacatagcagcttcataacngtttactttttnaatataaagatttttcaatttacacttgtcggngtagaaaaaactnatatgctaagtctgtaagctacgcagccnaaatantgatcttaatgaagccagaattctgtgaaaatgtgcaccacactgcata

SEQ ID NO: 982 - DNA, 516 bp, homo sapiens
  misc_feature (203)..(349): n=unknown
agcaaccatgacggaccagcaggctgaggccaggtcctacctcagcgaagagatgatcgctgagttcaaggctgcctttgacatgtttgatgctgatggtggtggggacatcagcgtcaaggagttgggcacggtgatgaggatgctgggccagacacccaccaaggaggagctggacgccatcatcgaggaggtggatgagnacggcagcggcaccatcgacttcgaggagttcttggtcatgatggtgcgccagatgaaagaggacgcgaaagggaagagcgaggaggagctggccnagtgcttccgcatcttcgacaggaatgcagacggctacatcgacccggangagctggctgagattttcagggcctccggggagcacgtgactgacgaggagatcgaatctctgatgaaagacggcgacaagaacaacgacggccgcattgacttcgacgagttcctgaagatgatggaaggcgtgcagtaaggagtggacagtcgctctaccaagtc

SEQ ID NO: 983 - DNA, 488 bp, homo sapiens
  misc_feature (72)..(161): n=unknown
  misc_feature (297)..(424): n=unknown
gggccgcgcctccctggtggggacccggcagggcggagtctcccacaccctagggacacgcgatcttggtanaggcgactgtccactccttactgcacgccctccatcatcttcaggaactcgtcgaagtcaatgcggccgtcgttgttcttgtcgccgtntttcatcagagattcgatctcctcgtcagtcacgtgctccccggaggccctgaaaatctcagccagctcctccgggtcgatgtagccgtctgcattcctgtcgaagatgcggaacactcggccagctcctcctcgntcttccctttcgcgtcctctttcatctggcgcaccatcatgaccaagaactcctcgaagtcgatggtgccgctgccgtcntcatccanctcctcgatgatggcgtccagtcctccttggtgggtgtntggccagcatctcatcacgtgcccaactcttgacgctgatgtcccacaacatcagcatcaaaca

SEQ ID NO: 984 - DNA, 515 bp, homo sapiens
  misc_feature (46)..(46): n=unknown
  misc_feature (239)..(239): n=unknown
  misc_feature (470)..(495): n=unknown
gcttaagtacataacaaggttattaacacttgcactcaggggaaangaaatagctattgcaaattaatgtgtgcaacttaataaaataagctgtttgtgtatatgaatttagctctaggtaagcaaaatgcacacatcatataaaaataaattgcaatgatcagaccaagtggctgtgctggacatcaaagaaaagacatgctgttgccatcaggagaactctttcttatatgcgatancaagatatcttctttaatatgaaaaaagttaatttctgaatttcaaaaagagtaagattagctaattggtcttcctaatttttatgcctttagagtttttagtctattcaagtagaagagtccagcgaggccaaagaagggttacggtgttcaagttctggttgttggagtttttagcccagagtgacatactgaaatcagtaaataattattttataatgacacagcacnactgccttgttatgnattttcttanatgcatatatactgtattta

SEQ ID NO: 985 - DNA, 100 bp, homo sapiens
ttacatattaaataacactacaatagaatgatatgacatagtttaaacaggagtgaaacggataaatttcaggttacataacccctccccctgaacaaat

SEQ ID NO: 986 - DNA, 493 bp, homo sapiens
aacatcatgagtcactcctgtccagtcagggacccagggttgggtagggtgacgacaggttacttggagcccaaaatgataagggaggctttcttatagggctcagaaattcactcgagatagttctcaaagaaaagggcctagagtgttttacatcctgtttgcatattcattttttctttatcttgatatttactgtctggaatatccattttttactcttccccatccttgtgccttttctcatattgattattcctcctgaaatgcctcccatccctccccattctttgtatctctgctgatagaaatcttagccagcccctaaggcccagctgagatggcaggtcccttacaccttcgtgtgccctgcaagattggagcacagcgactcattgtggctgagtgaatggatgctggtgctggaatgctacctgcatagtatgaatacattttcccattttaaaaataagcagtattcactctagaaaaa

SEQ ID NO: 987 - DNA, 501 bp, homo sapiens
  misc_feature (446)..(446): n=unknown
taaaaagttttctttttcctttttcctttctagaacattctaaatttttctagagtgaatactgcttatttttaaaatgggaaaatgtattcatactatgcaggtagcattccagcaccagcatccattcactcagccacaatgagtcgctgtgctccaatcttgcagggcacacgaaggtgtaagggacctgccatctcagctgggccttaggggctggctaagatttctatcagcagagatacaaagaatggggagggatgggaggcatttcaggaggaataatcaatatgagaaaaggcacaaggatggggaagagtaaaaaatggatattccagacagtaaatatcaagataaagaaaaaatgaatatgcaaacaggatgtaaaacactctaggcccttttctttgagaactatctcgagtgaatttctgagccctataagnaagcctcccttatcattttgggctccaagtaacctgtcgtcaccctacccaaccc

SEQ ID NO: 988 - DNA, 448 bp, homo sapiens
ttccctcacaaaaaaggaaccaaaacaacgaataagtttattttgtctggagtgactgaggaaatgccctggagagtaccaagagaacagcaaagtccctgtggagcagagagtcaagaatagctccacagggaggagaccaaagtatcctgcctctgccatactgtctcccctgcgaggattgaatcaaagccagggggttcctcttcttataggaagaaggtaagcggagaatcatcagtcctcatcaccaccacaggtgccagcagtcactgctacaagagagttccccagtcctcacaggtcccaagtccagcatgaacagttgctgaaagtgcatgtggctacattcccccacagcaggaacctctttgacaccctgcacccctgcaatccaagcagctaagggatgacacaactgtgaaaccaagccccacatctggagtgc

SEQ ID NO: 989 - DNA, 466 bp, homo sapiens
  misc_feature (157)..(437): n=unknown
ttcagaaatgtattattctgcatgttctagtctgttactgtggctctcaattgtattttttttaatttcattcacttaattcctcaagctccaagattcctgttttgttcctttccataatatctatctttgttcaatttctcactcagctaatgantttattaatttcgttaaattgttgtattctcttacaactcaaaagtttctttaatgtcattantttganttanttttcatgcatttcataaatatncttttcnttggattccatnactaaagatgcattgnggtgccaggtttgggggtgacacgtttccttgctttntcatgattcntctgnctctatgttggtacctgtgcangtaatgganaattgctttttccaannttaacgagcagcttncataggaagaggttgtttcctgntgntgggnccnaaggtgctgatttgaaatggcgtgtggtg

SEQ ID NO: 990 - DNA, 372 bp, homo sapiens
ggaaagaagaattctcataagtgtaaagaattttttcaaatattgcctcttaatgttgggaaggaggttggaatgcatatatattccttaatagaccagaacccaaggtcatgtcccagtccactcctctttttgtgctgtcagaaacataatatctcattagttactttggaatttcaaccttctctcttgcacctgttccacaatccgaaattctaataaaagccccacttctgttacttctgttaatatttgtggttattaactttctgataaactaatatattgcttttgttttatttactagcacttactctgctctagaattttgcctggggacctttcctattattaaccaaggaataccatgtg

SEQ ID NO: 991 - DNA, 604 bp, homo sapiens
  misc_feature (545)..(545): n=unknown
ccttatttccagggcaaggccagcgagacagagcccattgctcaggacgcagcccagattgcaaagagaggacagcccatggtagcggaagaaattctggcggagagcactgtacttggggtccttctctcgcagctggcggtagggatcgggaccctggtggctgcctggtacctccccacccaggcctcgctccttctccacggtttgcagggcccacatggcagctgtggtgcggggttccagccagcgggcgttgacagtggccagcgtaaggctcaggaacagcaggtaaagctggctggcctcccagaatgtgagctgagcccaagcatgctgtgaagccaagatgcagaggttgatgaaggcacagcccatggagatgtggaagtagaaggggaagagtttgctctgcactagtccgaagtatgtcggggaaggcttcggaaaagcaggaagcctgagacgaaggtcacccacatttgcatgccccaggcacctgacaagaccagtagatggaccatcttaatcaggctcctaggttnccgcttcctccatcttgctcgagccgattccgagcttacgtaacgcgtgcatgcgacgt

SEQ ID NO: 992 - DNA, 448 bp, homo sapiens
  misc_feature (146)..(146): n=unknown
  misc_feature (268)..(298): n=unknown
tgtgattatttttctccattcctaagttcatagttctgaacacttctcagatttgtgttaataattaaccttgaagaccatggtcactttagttctataagcaagtgctaagaccaaagaagtactcaattaaaaatctaactgcnggggagaaaggatgtttacaaaagtagaaagatccaattttctagaaagcatttctcttttgattttaatttttggtctgttgaggaaacccacctctgaaataccaattatattttggtgnctaaagcnaacatattaatgttcnattaantactgataccaaatatttatgttcagttttctaaggttgctttaaaaaaaaaaaacagcactattttcctgcttcccaattattgacattgcaagaagcaaatgttacctctaatagcgtggtccaaaataatgtctatttacattctca

SEQ ID NO: 993 - DNA, 396 bp, homo sapiens
  misc_feature (8)..(395): n=unknown
atacgcanangctgcaantaagtcttcccttcactaataaacatagatgccattgctcttgannnactcctgagagtgtnanagccttcaactgaataaccttgacaaagtgctctgagaatgnaaatagacnttattttggaccacgctattagagggaacatttncttcttgcaatgtcaataattgggaagcaggacaatagngctgttttttttttttaaagcnaccttagaaaacngaacanaaatatttggtatcagtnattaantgaacattaanntgnntgcnntanncaccnnaatntaattggtanttcagaggtaggtttcctcaacagancaagaattaaaatcagaagagaaatgctttctagangattggngctttctacnt

SEQ ID NO: 994 - DNA, 409 bp, homo sapiens
gagccccacgtgaggcttggtaggactgcggacgtatttgttttcttcaagcatttggtcgagattaagaattaaaaatgtcatccaaacaagaaataatgagtgaccagcggtttagacgggttgcaaaggacccgagattttgggaaatgccagaaaaggatcgaaaagtcaaaattgacaagagatttcgagccatgtttcatgacaagaagttcaagttgaactatgccgtggataaaagagggcgccccattagccatagcactacagaggatttgaagcgtttttacgacctttcagattctgattccaatctctctggtgaagatagcaaagcattgagtcaaaagaaaataaagaagaaaaaaacccagactaaaaaagaaatcgattcaaaaaatctagt

SEQ ID NO: 995 - DNA, 510 bp, homo sapiens
  misc_feature (361)..(507): n=unknown
tgaatctatcttaaatttacatgaggttttcatttttttaattcctatagaattatctaaatcagttttattttcagaacccttgtgattagccttcttggtttctttctttttctcaactagattttttgaatcgatttcttttttagtctgggtttttttcttctttattttcttttgactcaatgctttgctatcttcaccagagagattggaatcagaatctgaaaggtcgtaaaaacgcttcaaatcctctgtagtgctatggctaatggggcgccctcttttatccacggcatagttcaacttgaacttcttgtcatgaaacatggctcgaaatctcttgtcaattttgactttncgatccttttctggcatttcccaaaatctcgggtcctttgcaacccgtctaaaccgctggtcactcantanttcntntttgggatgacatttttaaattcttaatctcgaccaaaaggcttggagaaaaacaaatacgnccgcagncct

SEQ ID NO: 996 - DNA, 475 bp, homo sapiens
  misc_feature (18)..(18): n=unknown
  misc_feature (429)..(429): n=unknown
gtgctcagcacggtagtntacaaaaggactacatttccccaaatgcccgcaaagccttgtgcacgccttccggaaggagtttgttacacgaggtctgagagacagaggcagcgtgtttgagctgctggtgcggtggtcagcgcgatgcccaaggccaagggcaaaacccggaggcagaagtttggttacagtgtcaaccgaaagcgtctgaaccggaatgctcgacggaaggcagcgccgcggatcgaatgctcccacatccgacatgcctgggaccacgctaaatcggtacggcagaacctggccgagatggggttggctgtggaccccaacagggcggtgccctccgtaagagaaaggtgaaggccatggaggtggacatagaggagaggctaaagagcttgtacggaagccctatgtgctgaatgncctggaggcagaagccagcttccagaaaagaaaggaatactctgtc

SEQ ID NO: 997 - DNA, 349 bp, homo sapiens
tatttacatcacccaccctgaaaacagcaggttctggcttttccgtgaacccccagatgaatataaattggagcctctgagaacagttccttccccagagcggggagtgtgcacgtgtgtgtgtaaccttctgattccatgggacctggccagctcctctggagccacacagcacctccttgccttacaccctgggctccagcttcactggtccgggggacgcctcagcctggggcagctgtgatgtaaaccagtcactccacctccatcttcctcttctgcaaagaatcgaggaagtcttgccactcttatagtcctccccgtgggttctctaccatgtagcgtacat

SEQ ID NO: 998 - DNA, 503 bp, homo sapiens
  misc_feature (64)..(64): n=unknown
  misc_feature (243)..(243): n=unknown
ggtgcgccgagatcgcctccgcaggatgagggagtggtgggtccaggtggggctgctggccgtncccctgcttgctgcgtacctgcacatcccaccccctcagctctcccctgcccttcactcatggaagtcttcaggcaagtttttcacttacaagggactgcgtatcttctaccaagactctgtgggtgtggttggaagtccagagatagttgtgcttttacacggttttccaacatccanctacgactggtacaagatttgggaaggtctgaccttgaggtttcatcgggtgattgcccttgatttcttaggctttggcttcagtgacaaaccgagaccacatcactattccatatttgagcaggccagcatcgtggaagcgcttttgcggcatctggggctccagaaccgcaggatcaaccttctttctcatgactatggagatattgttgctcaggagcttctctacaggtacaagcagaatcgatctggtcggctta

SEQ ID NO: 999 - DNA, 481 bp, homo sapiens
  misc_feature (440)..(440): n=unknown
ttccagtttcaaagttgttatacttgaagttgctaatttaaaaaaacgaattttaaataatcacttaataatcctgctttgactaagacaatgaaatgtggctttaaaaaaaaagtattcagcaccatttgctcataggtctttcagagtttgttcttaaagtttctggaactttcctgtctgtaaagtaacaggaattactgagctacattggaaagcctctctgggacaggcagtggggagttaagcagtcatcataaaggaatcagtgtacattcagcatggtgacttgactacacaacaatcccttcccctctactgtagctcaagagagacatgcttctaaccactgaggtatgaggagtctcagactgttatttgctgttagaattggtcttccccagctaataacagtacatctctgggcacagatgctattnggccttaatgtcctgtgattttagggaatagttgggattag

SEQ ID NO: 1000 - DNA, 499 bp, homo sapiens
  misc_feature (381)..(486): n=unknown
gtgctgacaacatcgcccacctgaaggaccccctggaagatgggccccctgaggaggcagcccgggcactgagcggcagtgccacactcgtctccagccccaagtatggcagcgatgatgagtgctccagcgccaggccagtcagccggggcaggcagcaactctggggctgggcctggtggggcgctggggagccctaagtccaatgcactgtatggtgctcctggaaacctggatgctctgctggaagagctacgggagatcaaggagggacagtctcacctggaggactccatggaagacctgaagactcagctgcagagggactacacctacatgacccagtgcctgcaggaggagcgctacaggtacgagcggctngaggagcagctcaacgactgactgagcttcatcagaacgagatgacgaacctgaagcaggagctggccagcatggangagaaggtggctaccagtcctatgaganggcacgggacatc

SEQ ID NO: 1001 - DNA, 551 bp, homo sapiens
  misc_feature (11)..(11): n=unknown
  misc_feature (382)..(411): n=unknown
ggcaggcactntttccctgctctaggggattcctctctccttttccaagaaatcccctctcttcttagaagtgcccatgggaggctgggatgtgaaaagaaaccatacacaacactccagagccttaaaaaaataaagcaacaacctcctccacacgaatacacttacaaaataaatagacggataaaagagaggccacgtgcctcccatcccggctgtagggctgcttggggatagtggggctgggtggctcggtcccacttctcccagccaggatgatccaaaggctaaatggaatggaagggccctggcttcagagagaggatggggcaggacctctcctggtactcagcagggaagacactgggggcacgggtagggnnnnnnnnnnnnnnnnnnnnnnnnnnnnnnacccaacagcactctcagaggcctaagggcttagggtgaggctcaggggggccctggggctgtttccctgaaaataacagatccagtacaggcagaaagaacagaagggaaaacacaggccacacccacctggcctgcag

SEQ ID NO: 1002 - DNA, 164 bp, homo sapiens
  misc_feature (41)..(150): n=unknown
ggcgcagagaaccccggctgctcagcgcgctccgcggtcanggagatccccgngagcctgtgcaagaaagtcaagcngagcaataacgcgcagaactggggaangccagagagcaaccagtgtcacctancaagcncatcangtcagcangaacaagagaagtc

SEQ ID NO: 1003 - DNA, 457 bp, homo sapiens
  misc_feature (413)..(413): n=unknown
gagtgcccatcccaccccgcggttgcctctcctcggcacccttgattgggttttgcactaaagaggtcagctgggccaatgatattgctccagaccgagtcctacccaccttcccccggaagtgtcccaagaggctccgaaggcctcccctccgagcccagctctcctgtctcctccacagccaggccctgcacgcccacctcctcggacacaggtgacagggttaccctccagtttgagctcatctgcacgagacacaggtagcttggggttgaagttaggactcctcctgggctggaggatttacctggtggggcacttccagactgtttctagcaatatacacacacgttctttcctgtgtcttcaccccaaaacttcagttgattctgactgggaggatctggggacanggggtcttgggctgcttgtgatacacagcccccagccaccctgc

SEQ ID NO: 1004 - DNA, 526 bp, homo sapiens
  misc_feature (175)..(352): n=unknown
  misc_feature (454)..(491): n=unknown
ccttgggtttgcaaaaagtcccacaagtgaagaggcagcagtgctcatgtgaacatggagcgctcaccccagcccctcagcacagccagggggccttggggtacacaccctccttccctggggccgccagcacctcctctgccctatcccggatggggcctgggggtctgcccanggtgcgnaantggnatctatgctgaaacacctaagtgcccaggaggtgcccccatggcccaggagtgacacggctcccccagcanccagagcccattcctgagccaganaggtcacggttgnnccaggaagagccatntgcnangntggccgcnaancntcactgagnatgtgcagnagtggcagcctctcagacatagagggggctccctgggtgacatctccagagacccccttgtcccccagacaccccttgggtagactgtgtttgacccttcanaaataggaantgngacctcgggtcgnaaattgctcanaattttctgcgtgtctcagatggttgttttcttaa

SEQ ID NO: 1005 - DNA, 223 bp, homo sapiens
  misc_feature (38)..(38): n=unknown
atggacctcataaatgcaaggtatgtgggaaagccttngtttatcccagtgtatttcaaagacatgaaaggactcacactgcagagaaaccctataaatgtaaacaatgtggcaaagcctaccgtatttccagttcccttcgaaggcatgaaacaactcatactggagagaaaccctataaatgcacacttgggaaagcctttattgatttctgttcctttca

SEQ ID NO: 1006 - DNA, 252 bp, homo sapiens
aagggcaacctccttattcatcgacgtactcacactggagagaaaccctatgtatgcaatgaatgtgggaaaggcttcagccagaagacatgtttaatatcccatcagagatttcacacaggaaagacaccctttgtatgtactgagtgtggaaaatcctgctcacacaagtcaggtctcattaaccaccagagaattcacacaggagagaaaccctatacatgcagtgactgtgggaaagctttcagagat

SEQ ID NO: 1007 - DNA, 256 bp, homo sapiens
cagcacacaggacccccggatcagccccctctttggccatctggacatgcatagtggcgcccagtcaggacccatgcacgggtgagaccctgccaggccaggatggaggggtgggggaccccaggagactcaagcctctgaagcctcctgtcctgtccccctgcccacccccagctttggcttcgggttgcccacgtcacgggcctacgcggagtacctcggtgggtctctgcagctgcagtccctgcagggcatt

SEQ ID NO: 1008 - DNA, 276 bp, homo sapiens
  misc_feature (205)..(205): n=unknown
agaagactgaaaaaaatcggtattttctgtatcagtcctcaaagaataaatatttgtggacagctcaatcttgtttgctttgacaagactggaactctaactgaagatggtttagatctttgggggattcaacgagtggaaaatgcacgatttctttcaccagaagaaaatgtgtgcaatgagatgttggtaaaatcccagtttnttgcttgtatggctacttgtcattcacttacaaaaattgaaggagtgctctctggtgatccactttgatct

SEQ ID NO: 1009 - DNA, 246 bp, homo sapiens
  misc_feature (74)..(245): n=unknown
aaaccttacaaatgtaatgtgtgtggcaaggtctttaattacggtggatacctttcggttcatatgagatgtcntactggagaganacctctccattgtaataaatgtggcatggtcttcacttactattcatgcctagcacgtcatcnaagaatgcatacnggngagaaaccttacaaatntaatgtgtgtggcaagatcttccttgncagtgnaacncctttnanttcataggcgnngtcatnc

SEQ ID NO: 1010 - DNA, 396 bp, homo sapiens
  misc_feature (20)..(21): n=unknown
  misc_feature (272)..(386): n=unknown
ttaggacaacatctaacggnntttccacattgagtttagttgtaaggttctctccagcatgttttatctgatgtttagtgaggctgagcgactaatgtaagatttgccacactcattacatttataaggtttttcactagaatgaattcgttggtgtttagtgaggcaagaccgccgcccaaacgccttgccacattccatacatttgtatggcttctctccagtatggtttctctgatggtaaaccaagtttgacctttcgataaaagctntaccacattcattanatttataaggnttctctccagtatgcatcatctgatgattaagcagaattgaacgtactctaaaggctttgccacactcattacatttgtaaggtttcnctccagtatg

SEQ ID NO: 1011 - DNA, 435 bp, homo sapiens
  misc_feature (131)..(420): n=unknown
gttttctattgacaaaagttacttttttgaacttggaacatacgaccctggccttgatgtttggggtggggaaaatatggagctctcattcaaggtgtggatgtgtggtggtgaaattgagatcattcccngctcccgagtgggccatatattcagaaatgacaatccatattccttccccaaagaccggatgaagacagtggagcggaacttngtgcgggttgccgaggtctngctggatgagtataaggagctgttctatggccatggagaccacctcatcgacccaagggctagatnttggcaacctcanccnngcaaagggagcttcgnaaagaaactttaagtncaaaaaatttcaaaatggnnncttgngagaanngtntttccctgacttaanggntcccattngtnagaccnaagtggtgtcctttt

SEQ ID NO: 1012 - DNA, 353 bp, homo sapiens
  misc_feature (304)..(307): n=unknown
aggaggtttagatggagttcagatcttaataagcacttcatgacccatcaaggaataaaaccatatagatgctcatggtgtgggaaaagctttagtcataacacaaatctacacacacaccaaagaattcacacaggagagaagccctttaaatgtgatgaatgtggaaaaagattcattcagaactcccaccttattaaacaccagagaactcacacaggtgagcagccttatacatgtagcttatgcaagagaaactttagtaggcgatcgagccttcttagacaccagaaactccacagangangggaagcatgtcctagtgtctccaaactgaggaaagttacctgtag

SEQ ID NO: 1013 - DNA, 605 bp, homo sapiens
  misc_feature (458)..(458): n=unknown
aaatgtgtcattttcattacgaagacaattttatggaatactaaataaacatatataaataagccttggccaacattataaaccaggatctgacatagatataaatccatgccttccaacttcccttgacgtcacattatcttctcttaagagatagtcactttggctaatagggaaaagaaaaccagtaacatcagaaaacaatttccatctggcctggctctgactggcatcatcactgtgagccatatgccttacttttctctgacacttcaggatgttccctcctggtatcagctgtgcaccaaagctaaaagttcacaaggctctccttgccattctcaataaatcagttttgcaaaatctccaggccttcttgcagagtattcaggcatatagggttgtagttgatcagccataaagatggggctccctttaggtcctgcagcagtatggcncagtttgaaagcctccatccagtccacataatgaaagtcagaaaaagaccatttaccacttatctgtgctttctacaaaaaaaaaccagatacctggatgagggccaagactgcctcctcatcatttcactatatgtctatgtgaca

SEQ ID NO: 1014 - DNA, 441 bp, homo sapiens
gatgaatcactgcaacttgtgggacagccaccaccctgaggtaccccagcgcatcttgcggatcatgtgccgtctggaggagctgggccttgccgggcgctgcctcaccctgacaccgcgccctgccacagaggctgagctgctcacctgtcacagtgctgagtacgtgggtcatctccgggccacagagaaaatgaaaacccgggagctgcaccgtgagagttccaactttgactccatctatatctgccccagtaccttcgcctgtgcacagcttgccactggcgctgcctgccgcctggtggaggctgtgctctcaggagaggtgtgtcctctgtgggctggggagaggaggactggggggaatggaaaaagagagcatctgctgtttctggaggctctgagagagtcaagcagggcctgaggaaaggggccatgggg

SEQ ID NO: 1015 - DNA, 130 bp, homo sapiens
atcaggggaagcaccaaacatcctcaactctgctcacccatggttttctcccgccctcccagagctcctcctgcgtgagtaatgcagtgtgtgctggtgcagtgtctcactgaaaaaagaaagaaaccct

SEQ ID NO: 1016 - DNA, 99 bp, homo sapiens
cacacactgcattactcacgcaggaggagctctgggagggcgggagaaaaccatgggtgagcagagttgaggatgtttggtgcttcccctgatctcgag

SEQ ID NO: 1017 - DNA, 481 bp, homo sapiens
  misc_feature (455)..(455): n=unknown
tattaagtcagttttatcaggtaaagttgaatgaaataatcaagtttaagtgcgtcttgggtatttgcaaagatgtatagattaaggctaaaagggttggagaaatagatttgggagttacctatgattttttttggttattctgctctcaggattgaaaactaaagaatctcagaactgcatttctaattagtgccataaaattctttattgatgccaagtttttgttttttccttgtaaattgtggtaggtagaattctaaatgacctccagtagacccactaccagtatatattgcataatccatgggactgtgtgactagggtggcttatactcctgtgattatgtttaatatatggcacagttgacttcgagaagggaatttattgtcagtgggcttgacccatttgccagagcccttttaaacctgtatttagaggtccagaagctgangaggtaagagattcgaaagccaggag

SEQ ID NO: 1018 - DNA, 476 bp, homo sapiens
  misc_feature (75)..(267): n=unknown
taatcaccaatgtggtggtatgagaaggtgggacttttgggaggtaatcaggttaagggggtggaactctcaggnnnnnnnnnnnnnnnnnnnnnnnnnnnnnnnnnnnnnnnnnnnnnnnnnnnnnnnnnnnnnnnnnnnnnnnnnnnnnnnnnnnnnnnnnnnnnnnnnnnnnnnnnnnnnnnnnnnnnnnnnnnnnnnnnnnnnnnnnnnnnnnnnnnnnnnnnnnnnnnnnnnnnnnnnnnnnnnnnnnccattgtttatacnccactcgatctgtggtactttggtacagcagccccagtggactaggataacaagcatcgtcctacaatttctaatttggctttgaatcactgttcctataatctccagcttgcttctttcctccagctgcttattttctccaactagcatttcacaattccttcctacgttcgttcactgaatacattcaggctgaaaccaagtatctg

SEQ ID NO: 1019 - DNA, 527 bp, homo sapiens
  misc_feature (472)..(490): n=unknown
gttacaggtggatactttttcatagcacatacccccaaaaacctggggatcctgggttacataatgagctccttcttggattatttgcaagagtcttctaagtgggccttaattcaccctgtacaccactaccaaattcatgtgtctgaagtgattcctggtatctgggaggcttagactggaggtctggtgttaattgccccactctgaaatttcactgctatatttaatatttaatcattttattaaatatttaatatttaatctcgtattgtcttttttacccacttatagcatgtattttctgaaaggtgtaacttaatcatgcccataaaaatgcagtatttcattatgtattcactgacactttttggtttttttaaatgtctgtttttagatgtgaataactttctttccctcctcctgaggactaaagtctgattttttatcttgcccaaatttcctatctaangggtctngggagtcatgnccctgcaaccataaactctcatcagatgggttttaat

SEQ ID NO: 1020 - DNA, 420 bp, homo sapiens
  misc_feature (327)..(396): n=unknown
accaggcatttttgtacatgttataatcatctatgacttgtctttttcccttactaacctgcaaatcacttaaggtaattttttctttacacttttccaataaacttttattattggttaagtcagttttagctgttttaaaactcaactttgtttcccctttatcatctaagcctagatggtggcacttagtggaccttcaaaatatatttaaactgaattatcttttgaatttcaggaggatgtgaaaatgctctcccatctgctccaggctttagattatggggcaccccctcatggaggaattgccttaggtaaacaactttnccttttataaagataaactgaattcccattgcactgtctcaaattcagggtctcagtttgtggtggtangaggtggaagggatgagtccaaga

SEQ ID NO: 1021 - DNA, 481 bp, homo sapiens
tggtgaagaatgttgcctggattccttccatctaaagacttgattgttagacctgtggcagaactctagatctgactttagccttggggaagcaaagaggacaaaacctaaaagctcaactttctgcatggtatgcatgattcaatgagctctttctgctttggagtctgttggcttggagactcggatatgatagggcttcagttcctcaggagggagagaatctggggtattgctcatgaggtcatgtccccggaaggactttgggaaggctatgacatctctgatgcttggagatccagtgacaaggcatatcagtctgtctaaccctgtgagtaaaatacaaagataacagatgagaaatgtaatctaatgttggaaataacttagtttttctataaaagttgtagaaaacttttaaataagaatctttaacaaactgtagccaaccatcgttccctacctttttagagaacttttg

SEQ ID NO: 1022 - DNA, 421 bp, homo sapiens
  misc_feature (364)..(413): n=unknown
gctccttccaagcccagacccatatgcagaggcgggggccagaggtgaacattttggcaatctggtgtccctccccagtacattggtctctcgcttcctgacctagaccattgggaagttcttcctgtggtctgttgaacagctgttctgcttcagcttgagtcattagcctccttgtggaaccaaagagctagtaactgctggtccctcaagccttctgttcacacagtcaaccctggagcctccatggggcagagagggctgagaaatgaataatctgagatgaacatagacacaggcagccaaccgaggctctctgatcacacccgctcgttccagtttggtgtgggggaggatgtacagntctccctccnacatacaatctgattcaagggtgatactttcaagtcctnccagtttg

SEQ ID NO: 1023 - DNA, 491 bp, homo sapiens
  misc_feature (411)..(483): n=unknown
tttgcctcagtttatattgtatgccagttgatggaagatctgaagtggctgtggtatgaaaacaggatatatgtattaggctatgtcttgatagttggatttttcagctttgttgtttgttacaagcatgggccccttgcagacgacaggagcagaagtcttctgatgtggatgctgcgactcctctccctggttctggtctatgctggtgtggctgtgcctcagtttgcctatgcagccataatcctcctcatgtcctcctggagtctgcactacccactgagagcatgcagttatatgaggtggaaaatggagcagtggtttacatcaaaagagctggtggtgaaatatcttacggaagacgagtacagggagcaagctgatgctgaaacgaacagtgctctggaggantacgccgggcctgccgaaaacccgactttccctcatggctggtcgtctccagactccacactnctagcaaanttgcagac

SEQ ID NO: 1024 - DNA, 133 bp, homo sapiens
  misc_feature (7)..(132): n=unknown
tatgtcntgtctaacagaatttgaacatattaaaatagatgaccaaatannanatatttagactangtagtggnacacatgatttatgncngtcanttcntgaaaacttatgnggacttcantgacnttacnt

SEQ ID NO: 1025 - DNA, 456 bp, homo sapiens
  misc_feature (418)..(424): n=unknown
cacacatacaaaatacttttacactgctacatttcatcaggaggatgtactaccatttatatgcccagttcccaagaataaacagttgggtcattaccatgcctttgctaaaaactgctgaaacagactttgcatccacagtctgcacacgtgaacatgtttctagatgtggagttgggggccaaagagtaaatggattttcatctttgacagatttgccctccaaaaaagacaacactagtttccattcccaacaaaactccgtgagcttacctgacagcctttggtaaacagtatctatgtatattaaactcctgatctcagttgctggcacaggtgaaaaatactatctctaggtggttatttgcatctgtgactgagactgggtctctttttaaatccacacatggccatttcnngcatntatttcctacgggtgtcactgtgttttgcaca

SEQ ID NO: 1026 - DNA, 505 bp, homo sapiens
  misc_feature (119)..(427): n=unknown
aagcattcacatcaaagtgccacatcatgggtatgcatacatgtttgtatatcatagactatctggatgtttttaagtttcttatcgagatataattcatataccataagtgttgccannnnnnnnnnnnnnnnnnnnnnnnnnnnnnnnnnnnnnnnnnnnnnnnnnnnnnnnnnnnnnnnnnnnnnnnnnnnnnnnnnnnnnnnnnnnnnnnnnnnnnnnnnnnnnnnnnnnnnnnnnnnnnnnnnnnnnnnnnnnnnnnnnnnnnnnnnnnnnnnnnnnnnnnnnnnnnnnnnnnnnnnnnnnnnnnnnnnnnnnnnnnnnnnnnnnnnnnnnnnnnnnnnnnnnnnnnnnnnacttagcatcatatttttgaggatcatccgtgctatatcatggatgggtaccatgttcctttgatggctgnataatacccccttgtagggatggaccacgtttagtttatgcacacatgagcttgacctgggctgctctttaaagggta

SEQ ID NO: 1027 - DNA, 520 bp, homo sapiens
ataaaattgtcatgagctgtgttgaagacagggtgctttcaaatagaggtaatttgctcttgtgttgtaagaggaacatgtcaacaaagataggaaatgagggtgatcgtgcagatggcttgtatcttatatatgcaaaggagccaatctcagaagcacaaagaaaaaagtgtgcataccttattttgtacagataaagatgatgtctttttgttattgtctgtctgttttgtatgtgtctgagataagggatagagaggaaacatccgtcaggctaatttaactacattttattttaaaaatagagaaacataacctctagatgggacagcagaggacagttagtagaggccacaaactgttatgggctgctgtgttttgttctaaaatcaatatggttggagcatgtatatcttaggtgatcatttcacatcttaggaatgcctactcattttattttattctagtgatgctcaattcactatttaatttattatattttctctctgtggcacttata

SEQ ID NO: 1028 - DNA, 452 bp, homo sapiens
  misc_feature (25)..(25): n=unknown
  misc_feature (307)..(427): n=unknown
aaagtgtggaaggttggaggaaatncacaaaacccgtaagttttagagggtctgaaagcaacattgtctatcaaatggatacggcacagattattcatctttacttgttgtcacccatttgaccactgatactggcaaccataatttgtagttcagaatggtcatccatccatcgttgcatcattcaaagtgatgtggcttaagtgtatataatgattattaatagttcatcttcgactttgcctgtggattaattggtgtgctttgtaacaagatagtgctagtttaattttttaacattgtgaanattgtgaccatgttttctaagaggtcagataatgagaatggttataatacccaatgcaacccatgaccccatcactnaagaagaaggctaaacgactatgtattttgatggatggatggnaggacacatactactgaactaggaa

SEQ ID NO: 1029 - DNA, 396 bp, homo sapiens
  misc_feature (48)..(48): n=unknown
  misc_feature (383)..(383): n=unknown
ccttagacttctggtttgcctgcaatggattcaggcagatgaacctgnaggataccaaaactttacgagtagccaaagcgatctacaaaaggtacattgagaacaacagcattgtctccaagcagctgaagcctgccaccaagacctacataagagatggcatcaagaagcagcagattgattccatcatgtttgaccaggcgcagaccgagatccagtcggtgatggaggaaaatgcctaccagatgtttttgacttctgatatatacctcgaatatgtgaggagtgggggagaaaacacagcttacatgagtaatgggggactcgggagcctaaaggtcgtgtgtggtatctccccaccttgaatgaagaagaggagtggnttgtgccgacttc

SEQ ID NO: 1030 - DNA, 451 bp, homo sapiens
  misc_feature (23)..(51): n=unknown
  misc_feature (269)..(422): n=unknown
gaaaagacaaggcactgggcagngatgagggtccttctccatctcccagcnctcctggcttccctcatcttgcttcaggctgcagcatctaccacaagagactaccagaacctctgccatctccgatactgtgagtcaggccaaggtccaagtcaacaaggccttcctggactcccgaaccaggctgaagaccgccatgagctctgagactcccaccagccgacagctctcagaatacctcaagcatgccaaaggccggacgcgcacancccatccgcaatggacaggtgtgggaggagtctttaaagagactgaggcagaaggcatccttgaccaatgtcacagatcccagccttggacttgacttcactgtctctggnggtgggctgtggtgcncctggntcccgtggtgagatgcgacncgtgcagcccttaccgcaccattaccgga

SEQ ID NO: 1031 - DNA, 208 bp, homo sapiens
  misc_feature (26)..(26): n=unknown
  misc_feature (144)..(187): n=unknown
gattaaaatacagattttaataattnccttactacttttataggtagtgctttcaaataaaaccagtgtttgctaaatccaaatgtctttctcccttgctaaattatagcaggagcatgctaaatatttcatcagactactggnatgatggttttacattttaatgtttgaaaacataattttggtncaattgcagtgtaaaactatt

SEQ ID NO: 1032 - DNA, 430 bp, homo sapiens
ctctagtcctcgtggttgcctgccccactccctgccgagacgcctgccagaaaggtcacctatcctgaaccccagcaagcctgaaacagctcagccaagcaccctgcgatggaagctgcagatgcctccaggagcaacgggtcgagcccagaagccagggatgcccggagcccgtcgggccccagtggcagcctggagaatggcaccaaggctgacggcaaggatgccaagaccaccaacgggcacggcggggaggcagctgagggcaagagcctgggcagcgccctgaagccaggggaaggtaggagcgccctgttcgcgggcaatgagtggcggcgacccatcatccagtttgtcgagtccggggacgacaagaactccaacttacttcagcatggactctatggaaggcaagaggttcgccgtacgc

SEQ ID NO: 1033 - DNA, 557 bp, homo sapiens
gctggatgtctccctccccaacccctgcaagctggcccatccttccagagcccccataggcctggggctgttgagacgggagatgtccccactgtgctgctcctggttttgtctcctctccaatccttgagcaccctgatatgcaacatggggggtaatcagaaggaggaggcagcctctgatggggcaacggctgagggtgggggcagtgtgtaaggcaccttttgcggtcagcccagccacactccatcgccagagagaatgccaaagtgtagactgaatgaaattctgtaggcaaatggtaaatggtagctgggccagtagctatttgcatgggtggattatatcatgttaagggaattctttatctcagcagagggaacagaggaatatcttggctaaggtcatcctgccagtcaggagaagccaccctccagggaccacagactcaaagtggctgtggtggagacccaccgcctgggtagggtgatgtcaagacactgagaggttccatctgcagtggccaagggctgcaggttctgccatgctgggcattg

SEQ ID NO: 1034 - DNA, 150 bp, homo sapiens
aaaaagttaaaaatacaaatatagcactgtaaacatctgatatgtatcctttcaaacttttttctgtatatatttatttgttaaatttgtattgatgccctcctttagtgtagactttctattaagaactggaaacagagccaaacaaaa

SEQ ID NO: 1035 - DNA, 494 bp, homo sapiens
  misc_feature (490)..(490): n=unknown
ttcttggctgggccagcatacgggataaaataacttgcaaatgatgacagatgtctttaccctatattcttttctatctggaatcaaagcttgtttggagacctgtatcatcatcccagtacaaacctcttgccctcccagcatggctgccataaataatgactcatgtgcaaagaaccaacccccaggaaggcactcctcccataaggtgacacagccacacttctcaagggactcctgagggcagagcagtaaccctgggagtttgtcctaagtatcttacagttgagcagaggagcttcagggtagctgaaagtgtctcgtcagttttacttttaaatgtttttttcctatttacctatgtgagcaaaaatttactactgtaaaattgaaacaatgaaatatacccataaaggcttagatatactcataaaggccgtgtctgccatatgaaacctgacttcaaatctttatggttcctcaaactaancctg

SEQ ID NO: 1036 - DNA, 256 bp, homo sapiens
atcactggcatggccccttccaaaccctgaagagcccaagcaatgtggttgtaaaatttgcaaaataagattaaatcttaactgcaatctgttaacactgctgtctcctttcactctttctcctatatcacactttcccacatgttggatggccttggagtggtagccataagcatttttggaattcaactaaaaactgaaggatccttgaggacggcagtacctggcatacctacacagtcagcgttcaacaagt

SEQ ID NO: 1037 - DNA, 517 bp, homo sapiens
  misc_feature (70)..(301): n=unknown
cactgttgtcacaactgtaccatacatttgtagtgtaagaaagatgtttgtaatcgggaaaactgggatnnnnnnnnnnnnnnnnnnnnnnnnnnnnnnnnnnnnnnnnnnnnnnnnnnnnnnnnnnnnnnnnnnnnnnnnnnnnnnnnnnnnnnnnnnnnnnnnnnnnnnnnnnnnnnnnnnnnnnnnnnnnnnnnnnnnnnnnnnnnnnnnnnnnnnnnnnnnnnnnnnnnnnnnnnnnnnnnnnnnnnnnnnnnnnnnnnnnnnnnnnnnnnnnnnnnnnnnnnnnnnnnnnnnnnnncacttgttgaacgctgactgtgtaggtatgccaggtactgccgtcctcaaggatccttcagtttttagttgaattccaaaaatgcttatggctaccactccaaggccatccaacatgtgggaaagtgtgatataggagaaagagtgaaaggagacagcagtgttaacagattgcagttaagatttaatctaatttgcaaatttacaaccacattgg

SEQ ID NO: 1038 - DNA, 446 bp, homo sapiens
gatgtaaaggcctccagagggatcccgtgacgggcaccgcttgccactcatcttgcactcgggacagcagggtggagccaggccgtctctggcttctggcatgtccacagtgtaattagcacttgggtttgaacatgtttgtgtcttcagccatgtgcgcacagggcctctgagaacccgccctgcctgctgtgggacaccggcttgccactgcctggggcttgtgagaaagtgccagaagcacttaatggggaaacccaagcccacctctattgtgttgttttcacagagcagagagaaaggtctggagaaacctcacagctttggaggggtacagctgagcctgcttcctgctctcgcagtgcgtttcagctctttcgtgaccactgctcctagtgggggtgtctgctacagttatcaagtccctaaaagagtggatctaagac

SEQ ID NO: 1039 - DNA, 503 bp, homo sapiens
gcacctattcttgatacttgcacaaagcagttttccatcacagaagcctcggaaacatctcagtgaggggagtgcagggtctctggcaggatgggggagcttgaccaagggagggagctggtccctgcttccagcagcagagtttcactccaacatgtgcaacggcccaaaccaaagagtgactgtgtgccatctggttagaggaacccaagaattctagaggcatcagagtccctgatgctgacgtggggatcatgttcataagcaaacttgttttctgcacactcctgttttccatttaactttctttcagcagatgaaaatcagactgcacatgccaagcaaccagacactggcctgcagccttgggatgccagatgaaagggaaccccaggacagggggcaacatgcaagcctgtctagatccactctttagggacttgataactgtagcagacacccccactaggagcagtggtcacgaaagagctgaaacgcactgc

SEQ ID NO: 1040 - DNA, 296 bp, homo sapiens
  misc_feature (226)..(291): n=unknown
ataatagaaaaaactggacttcatgctgagtatagatgatacatataaaagaagtcaaaatttggagaaaaaatttaaaaagataagtagaaaaatgaagtaactgtagaaaccatacttactctttgatctcaaatgcccaaaaactgaatgaaaatgtgaatttaggccgaccaggtagtcttgtcaataaactaaaagaaaaacagggaaattgagaatatgntaccactataaccacaccaaacagctagtttgaacactgcagtcttaatataaagctttatagtnatttt

SEQ ID NO: 1041 - DNA, 541 bp, homo sapiens
  misc_feature (493)..(525): n=unknown
agtcctgttcccaagtccaaaccactttttaacttaaatcttgagtttttctgaattactcaatttgaagtaattctctttatatctgaaaaatggttttattgaaacgtttgagattaaaaaatatgcattgcaagaagcatatgacaaacattctgagagtacaaaattagttgtaaaaaataacataatttaccagtaaacccactcatatagaaatgtgcaaagccttttgatataaaaagttttgtacaccaagcacctatttttataacttagcttcccatggagagataatggcttgcgtgcattttatgtatccataacatacatacaaggctcggtcttttcaatgggataacagttcacaactcttcgatttgaattgtaatgaatctggtgacaaggatttttctctaatggattccaaagttagccagaacttttaatgtcaagatgaaaagggtgtaaggtgttatattttcttcaattnctttaccacaggagggctaactccacaatttnccccatggttctccat

SEQ ID NO: 1042 - DNA, 160 bp, homo sapiens
  misc_feature (105)..(146): n=unknown
tccacgtcaggaacacccatgcccgcccaaccccctcctgagactgggccgtggatccccggatttggccattcagagaagttcaccttggagggggtgtgcganangggggtttcctctgcggccgaagaagggttaggagcctnccttctgaagacct

SEQ ID NO: 1043 - DNA, 517 bp, homo sapiens
  misc_feature (454)..(467): n=unknown
ggcctcaggctcgctgtcgcgccattttgccggggtttgaatgtgaggcggacggcggcaggagcgggtagtgccagctacggtccgcggctggggttccctcctccgtttctgtatccccacgagatcctatagcaatggaactcagcgatgcaaatctgcaaacactaacagaatatttaaagaaaacacttgatcctgatcctgccatccgacgtccagctgagaaatttcttgaatctgttgaaggaaatcagaattatccactgttgcttttgacattactggagaagtcccaggataatgttatcaaagtatgtgcttcagtaacattcaaaaactatattaaaaggaactggagaattgttgaagatgaaccaaacaaaatttgtgaagccgatcgagtggccattaaagccaacatagtgcacttgatgcttagcagcccagagcnaattcagaagcanttaagtgatgcaattagcattattggcagagaagattttccacagaaatg

SEQ ID NO: 1044 - DNA, 569 bp, homo sapiens
attcgtgacaagttcaaaaggagaacttcctttgttttaatgcagctgtgctcagaagcctgtgatttcctaggaaaccatctgggtttagcccattagaaaaatgcagtttaaagcagtgtcacactggctgcctgaaggtacccttggagatactggagcgcttctgcattcaggctggtgctcaccattgatggaacccttcctggacaggcggtagacaacttgtgaagtgactgtgccaggtgaattttggggttattcaccatttgacctacaggatcatgctcttttttcccagcaaatgccaactgtgagaaggcagtctgatatcctggtgtatcttctatgtcaataaaatgttcctcatcaggaatggtatcatcttcgggtaactcaaaaagaccaatcaaagactgtaataatggagtccacagtttggtatactcagtgtccatcattgggggacattctgttagtaatttggttatgccaaccgcacagatctttttctctacatttccagataccttctgaatttcaggaataataattttttccaaaccatt

SEQ ID NO: 1045 - DNA, 221 bp, homo sapiens
  misc_feature (187)..(195): n=unknown
ggagcaaggagcagaatacagacaggttggggagctcagccctggggtgccaggggatgggaagtgggaggactcaaggatggggtcaggtttgacccgagagctaggggaacggctggcatggagcagactggaagtaccgaggtggatccccgggagagggtataggaagggaagcagcaagcangagtgcangggagaaatgcagggttttctgtgtg

SEQ ID NO: 1046 - DNA, 514 bp, homo sapiens
ctccatcagcggggtggcctggggagcagctgcatgggtggcactgtggggagggtctcccagctccctcaatggtgttcgggctggtgcggcagctggcggcaccctggacagaggtggatatgagggtgatgggtggggaaatgggaggcacccgagatggggacagcagaataaagacagcagcagtgctggggggcagggggatgagcaaaggcaggcccaagacccccagcccactgcaccctggcctcccacaagccccctcgcagccgcccagccacactcactgtgcactcagccgtcgatacactggtcgattgggacagggaagacgatgtggttttcagggaggcccagagatttggagaagcggatgaagttctcctttagttccgaagtcagctccttggttctcccgtagagggtgatcttgaagtactccctgttttgagaaactttcttgaagaacaccatagcatgctggttgtagttggtgctcaccactcggacg

SEQ ID NO: 1047 - DNA, 209 bp, homo sapiens
gaaattctgaacaagtttcaggcatactggttcttcctctctttgcaacatatcaaaaagtatacattcagacttagaaattatggatctcagacctctgttggtttcagagaagagtatgcagagggtataagtgtgcatgtgtgtgtatgtatgtgtaggcatgtatttactgtgatgttactaactgtagacacagtgatatctca

SEQ ID NO: 1048 - DNA, 201 bp, homo sapiens
tcactgtgtctacagttagtaacatcacagtaaatacatgcctacacatacatacacacacatgcacacttataccctctgcatactcttctctgaaaccaacagaggtctgagatccataatttctaagtctgaatgtatactttttgatatgttgcaaagagaggaagaaccagtatgcctgaaacttgttcagaattt

SEQ ID NO: 1049 - DNA, 405 bp, homo sapiens
  misc_feature (389)..(389): n=unknown
gtggtgcaggcagatgtagggaagctccagggatagcaaagccccaaggctcctgtgtgtgcctagttttgaggagcaaggaggaagagttattggaaaccggagacagcgagggctgtgcgaaggagccctggccagagctgaaacttggattgaggccagcagccgtttcacagtgacccctagagagggagccccagggaagagatcggatgcctcagcctccctctccctccctcctgtcttctgctggggctccctgttgctaaaaccaccctgtagcagaggaggagcaagcccttgcactagtccctgaggtcaatttggggtgcagagtcagacggaaaagggaggaccagtggagggggactggcacagtggctgcgcantttccttttcccgtag

SEQ ID NO: 1050 - DNA, 331 bp, homo sapiens
ccttccctaaactcctagttgaactctgaccttgtggctctgatggagtgaagtctcaatccctggaatcactgctgtggaaggggcttcagttcatcccttcagcgacatgggccacaggaatgagaggcttaggagaccctccctaagaggcctggtaaaaggcagaagctggaaatggtgctgttcagcaggcctgagccgaacatggcacatcaggccctgcagccagggcagggacccttcctggaggccagggtcccgcacgcattgtctcaccccagccagtgtgtggtggagcagaaaaaaaccgaggcttcagtcaaacaga

SEQ ID NO: 1051 - DNA, 389 bp, homo sapiens
  misc_feature (184)..(184): n=unknown
  misc_feature (368)..(368): n=unknown
agaggctttccaaacagtgcaagctgtgacttagaagactgtttccaaaggctaaacagatagtggaggctctcagaaacatcacgtggaaaataactttaaaaaaaaaatgggactagatgatctgtgctcccctccccttctggttggtttggttccctgacgagactgcagttttgcgaantgttcttgagatctgtttactggtattgctgtgcgctttctttggggcttttatttccccctctgttttctgagttttagagctctctattacctgtaacgtatatattgcccccggcaaccctgcggccttcccacacacacacggatgcgtatcccaaatctaaaatccaaaatcagaatgnatcaactgtaaaaaattttat

SEQ ID NO: 1052 - DNA, 349 bp, homo sapiens
agatttgggatacgcatccggtgtgtgtgtggggagggcgcaggggtggcgggggcaatatatacgttacaggtaatagagagctctaaaactcagaaaacagagggggaaataaaagccccaaagaaagcgcacagcaataccagtaaacagatctcaagaacagcttcgcaaaactgcagtctcgtcagggaaccaaaccaaccagaaggggaggggagcacagatcatctagtcccattttttttttaaagttattttccacgtgatgtttctgagagcctccactatctgtttagcctttggaaacagtcttctaagtcacagcttgcactgtttggaaagcctc

SEQ ID NO: 1053 - DNA, 601 bp, homo sapiens
  misc_feature (89)..(374): n=unknown
  misc_feature (538)..(538): n=unknown
ccctgggcccagggctgtcctgaaggaaaggacacaagcctagctggcttcactacttgatgattgtagagccctagggcctggagggnnnataggccagataattatacaggcctnnnnnnnnnnnnnnnnnnnnnnnnnnnnnnnnnnnnnnnnnnnnnnnnnnnnnnnnnnnnnnnnnnnnnnnnnnnnnnnnnnnnnnnnnnnnnnnnnnnnnnnnnnnnnnnnnnnnnnnnnnnnnnnnnnnnnnnnnnnnnnnnnnnnnnnnnnnnnnnnnnnnnnnnnnnnnnnnnnnnnnnnnnnnnnnnnnnnnnnnnnnnnnnnnnnnnnnnnnnnnnnnnnnnnnnnnnnnnnnnnnnnnnnnnnnnnnnnnngtaccccataatgcagatacggctgtggtgtccacaaacttagatcataacaaccaagtccctttgaatacttggaaagccttcccaagaaggatgggtacaaacaactccagattgtgaagctacaataaattcttaactcttcagtgcctagacacccatgnatatccacaagcatcaaaaccatctggggaaacatggcttaccaaatgaataaattgaccagg

SEQ ID NO: 1054 - DNA, 454 bp, homo sapiens
  misc_feature (5)..(93): n=unknown
  misc_feature (194)..(194): n=unknown
  misc_feature (324)..(441): n=unknown
agctnccactgannagtctgctgccagangtgttggagctccatcatatgttatttgtttattttctgttactgcttttaggatcntttcttnatccttgacctttgggagttttgttattacatgccttgaggtaatttccttttagttaaatctgcttggtgttctataaccttcttgtacttaaactttgntatcttttgtttgggaagttatcttattatccctttgaataaactttccaccattatctctctctctctacctcctttaaggccaataattcttggatttgcccttctgaagctattttctagatcttgnaggtgggcttcattcttnttnattctntgctctnntgtctcctctgactgngtatnttcaaatagtctgtcttcaagctcactaattcttncttcctgcntgaacagttctgctacnaacagactctgac

SEQ ID NO: 1055 - DNA, 365 bp, homo sapiens
  misc_feature (131)..(177): n=unknown
  misc_feature (300)..(300): n=unknown
tcaggcacaactttaacaacacttattgagtccttagcatgtgctatactgtgtgccaaattatttgcttttaatgtgctgtgaaatatctgtgcagtagatactaaaattctgttttattaacctaaacnnnnnnnnnnnnnnnnnnnnnnnnnnnnnnnnnnnnnnnnnnnnnnngggtaggtccatcattctcacccaggcagtgtgactcccagagcttgtgacattgatgtaaaactctgacaggaataaaggatttattgatatcattggttctcaaactttttttggtctcangggctctttatactctaaaaaattattgaggatccccagagagctttggttaaatgggtataatt

SEQ ID NO: 1056 - DNA, 337 bp, homo sapiens
  misc_feature (59)..(122): n=unknown
  misc_feature (280)..(323): n=unknown
tgcgctagaaagtacttaatataaaccagtggctctcaaaatgtggtctacggattcantggggattccagagtcctttttgggagggggttntgtaaggcccccttttttcatctatttgngactttggattgtcttcatatacctccaccaaaatgatccgccacagcaatcaaatgtgtttaagtaaaattgccttaagacacatgttgaatatctgtaaaaatgtaaaatgctactcttctcagcttttttagaaaagtcattttagaaatttgtnttaatttctactgttanggatgataatttntnacccatatnnncaaaagctctctgg

SEQ ID NO: 1057 - DNA, 431 bp, homo sapiens
  misc_feature (8)..(8): n=unknown
tctttgancagagcccagctctgcagcgccacttcatctttttaaacaccctagaggtctgtttgttgttgctgttgtcctttattttgaaagagttgcaagagaagttacagtccaggtgaacttggagattgtgggattggttttgtttctgttttgttttgtttatcatttacctgtagtgctattgctgttgatactatcacctataccctgtttctagtgagtgctgaatacagtatggtacaatgacagtaacagccgcgtggtgctgccaggactgcccttgggcatatcagtgacagcccaaatgtgggtggaggaaacctgtaatttccttcttaacatgtgtttgaaataccaagtgaataatactgttctggaaaaaaatgataaactagtggaaattaaagaaattaagggttttatat

SEQ ID NO: 1058 - DNA, 425 bp, homo sapiens
  misc_feature (343)..(415): n=unknown
ctgatgcaaaatagtgatcaaaagaaattagtttacaaaaagacttctaaaaatattttgagaggtggggcctgtctattatataaaacccttaatttctttaatttccactagtttatcatttttttccagaacagtattattcacttggtatttcaaacacatgttaagaaggaaattacaggtttcctccacccacatttgggctgtcactgatatgcccaagggcagtcctggcagcaccacgcggctgttactgtcattgtaccatactgtattcagcactcactagaaacagggtataggtgatagtatcaacagcaatagcactacaggtaaatgntaaacaaaacaaaacagaaacaaaaccaatcccacaatctccaagttcacctggactgtaacttctcttgcnactctttcaa

SEQ ID NO: 1059 - DNA, 395 bp, homo sapiens
  misc_feature (5)..(180): n=unknown
  misc_feature (320)..(394): n=unknown
aagangcgcgaggcggaattggggtctgctctaagctgcagcaagagaaactgtgtgtgaggggaagangcctgtttcgctgtcgggtctctagttcttgcacgctctttaagagtctgcactggaggaactcctgccattaccagctcccttcttgcagaanggagggggaaacatacntttattcatgccagtctgttgcatgcaggctttttggcttcctaccttgcaacaaaataattgcaccaactccttagtgccgattccgcccacagagagtcctggagccacagtcttttttgctttgcattgtaggaganggactaagtgctagagactatgtcgctttcctgagctaccgagagcgctcgtgaactggaatcaactgcttcang

SEQ ID NO: 1060 - DNA, 453 bp, homo sapiens
  misc_feature (295)..(445): n=unknown
aggcaggcctgagctccaaaaccttctgattgcccaagccctccttgtcttgcttggattatctccacacaaatggagaaactggacaaggtggtcatggaggtccctgaaagctcaaagactttctcattccaggattccccatgttcatatgccagcatggcatgggggtgctctgtagtcaagcagggtcctttggggggcttagggatggagccaggaaatggctctgggactcagcgggtgtccagagtctcatcagcagggtttctttactttcactgagtggctggtncctgcacactgagttttgcaggcttactctcacagagtgagcttcctgcaggccccccantgcaacccctttccttcctggagctgtgtgctgantggtncgtgaccccgcaggccctctccccatgctgctgatggtcagtttctctgnaacgtcgt

SEQ ID NO: 1061 - DNA, 405 bp, homo sapiens
acttgataacagcacgagtcccaaaacttttagaaataaaataggacattggcttgattgaaaagagggactttttaaaaattgttctttcgtcagaagccttttggatgacttacaatagctctgatgaagataccaccccagcgtcagtccaataggtcagtgagtttcaacaggcatccatccctcccatgaagggattctggtgatgggaagtttctgtaatgacaggaaagcattgaccctcattgattgtcaactttggtattagccatgaaagacaggatgctcattgggtgttctgtagagtgaggaatgctgcctattccctcccagaacgtctgacccaggggtgtgtgttgaggagccctgggggaaatggaccaagttttcccacagagcagt

SEQ ID NO: 1062 - DNA, 521 bp, homo sapiens
gcaataaataaaaccagacatattgacttctaaaaaacaaaaccaaacaaaaaaaaaatcccctaaactatatacatcctacaggaatacaggcattatcaaatgtagaaatggtatcactctgaaagatggggctatttacacaagttacaagaattgcgttgctgtctttaagaagtctcctccttgaataactcataaactctaagggagagagagtactggtggggaagcggggttcaaagaggagacatcctccatctttattgatggacaagacagtctcaaggaaaaacatcaatatccaaacaccgtattgagtcccttaacaaggctccacagatcagctggctttcaaaaagcctggaagggtgctccactcaggaactcccaagagaaaccatcttgtccctcagccaggctgggactggcagtgaggccatgctgagccagtggcaaacccgtgggctgtgggtttcacaagacaacctggctctgtgctgtcacacccagccttcaac

SEQ ID NO: 1063 - DNA, 532 bp, homo sapiens
aggagaacacgcaggcagcagagaccatggggcccatctcagccccttcctgcagatggcgcatcccctggcaggggctcctgctcacagattaccccagggcctgcatacagcaatcgagagacaatataccccaatgcatccctgctgatgcggaacgtcaccagaaatgacacaggatcctacaccctacaagtcataaagctaaatcttatgagtgaagaagtaactggccagttcagcgtacatccggagactcccaagccctccatctccagcaacaactccaaccccgtggaggacaaggatgctgtggccttcacctgtgaacctgagactcagaacacaacctacctgtggtgggtaaatggtcagagtctcccggtcagtcccaggctgcagtgtccaatggcaacaggaccctcactctactcagtgtcacaaggaatgacgtggaccctatgaatgtgaaatacagacccagcgagtgcaacttcagtgaccagtcacctgaatgtctctatgggccaga

SEQ ID NO: 1064 - DNA, 361 bp, homo sapiens
  misc_feature (21)..(52): n=unknown
  misc_feature (198)..(356): n=unknown
ggaaacaaatgagcagaggtnttgaanaatcncntntncgaganagtggggnacagggagcatgcagaccagggaagaagagacctgcaggaattagtgctgagaagcaggagtttattgggaggaggaggagatccattcccgggatacaggtctctctcccaagcatggcggtcagccctgcaggaaacaggacangaggnaaggccatcatacntgcnagtcttcttgaaatgcaganactacaccagagctactatatcanagccaccctggccagtactccaatcatgatgctgacagtggctctagctgagaggccaggagaactttccttgtactacagcattcagagnctgtg

SEQ ID NO: 1065 - DNA, 384 bp, homo sapiens
  misc_feature (382)..(382): n=unknown
gacagcttaaagaccgagctgtagaagcacagtcttgttacagtcttggaaatacatatactttacttcaagactatgaaaaggccattgattatcatctgaagcacttagcaattgctcaagagctgaatgatagaattggtgaaggaagagcatgttggagcttaggaaatgcatacacagcactaggaaatcatgatcaagcaatgcattttgctgaaaagcacttggaaatttcaagagaggttggggataaaagtggtgaactaacagcacgacttaatctctcagaccttcaaatggttcttggtctgagctacagcacaaataactccataatgtctggaaatactgaatttgatagcagttgaatggtgtacgncc

SEQ ID NO: 1066 - DNA, 589 bp, homo sapiens
  misc_feature (517)..(586): n=unknown
ataactctctaatacaaaataagcccttcctgaatgagaattataacactaccaatgttttcagtggtatctgagctgtatgcagaacgaaaaaaatatacagacatacttgacattttacaaggatgtcaaagaaatcttcatcagcctctttgttgtcattagtcatcaggtggctaagtaccgactggctgttttgtgttagacgaagccctggcaaattactgaaactagccctctggtcatccagacggcgactctgtgagctggcaagaagatctaaaaactcatccgtgttgggggataccacaggaacagatgatgtttttagcatcattttagggggagtggaagaagttgttgttgaagctgtatggcagttcttttcttgtaagcaacatctctgatcatccatcctattgctttgaaatcggcttaataagtcaaagaacccttcatctccaatagtatctgcactgattttcctctgagaatttggaattcggtggtcaatagnattactggcatcttggagaacttagtggaggaattcgttttgtattttttccccttcagtctgttgacnaag

SEQ ID NO: 1067 - DNA, 477 bp, homo sapiens
  misc_feature (7)..(7): n=unknown
  misc_feature (166)..(180): n=unknown
  misc_feature (374)..(469): n=unknown
gacggangccgggatacttgggaaaggatccgccggccttgaactcccgcctccgccgcccctaggcctcatggcggtccgagcttcgttcgagaacaactgtgagatcggctgctttgccaagctcaccaacacctactgtctggtagcgatcggaggctcaganaacttctacagganacagaagaaattctggcagatgtgctcaaggtggaagtcttcagacagacagtggccgaccaggtgctagtaggaagctactgtgtcttcagcaatcaggggagggctggtgcatcccaagacttcaattgaagaccaggatgagctgtcctctcttcttcaagtcccccttgtggcggggactgtgaaccganggcagtgaggtgatgctgctggggatggtggtgaatgactggtgtgcctnctgtggcctggacacaaccagcacagagctgtcagtggtggagantgtcttca

SEQ ID NO: 1068 - DNA, 413 bp, homo sapiens
  misc_feature (12)..(411): n=unknown
accctcagccancagccacagggcctgcnagccagcacaacagagcaggtttttgcagtaatgatagatcccggcnataagcacaggtgnaananggtccggtgcccagnccctcagtnccantgagctctctnccaactccctncnagcatccggnacagattgggcngnatntngacanggntngccacagtccacngccangngcccatggcncaacttggaaggtgactcaggtgaggctgtcaatgagggaatcccgcatnctggtggcaatggtgctaggctgggcttcattcagcttgaagncactctncaccactganagctctgtggtggttgtgtccaggccacagaaggcacancagtnattcacnaccancccagcagccatcacctcactgcctcggntc

SEQ ID NO: 1069 - DNA, 449 bp, homo sapiens
  misc_feature (302)..(394): n=unknown
gaggcctcctatctactcctctgccccagtcccctccttgcgtcagtcccagtgagggataagcgcctggcggaaggcgcagggaggtgtttctctgcttcaggagtgcccgccggcccttgcagctgctggaagacccatttatctcatgcttcttgttttctttggggacctgcaggggaaggaagcagggtgacggtttggtatccccacctaagaccctcccctttcccctgaggccagccgtcagcccctggcagggggtcttggaagccagaggtttttgctcagggcagggaaanggctgcaggattcccgggggctgccggaagtcggtctcactgacatcatgggtgaccccagcatcgnctggtcccacagatgtcggcctctngtcgcctgtgtcttctcaacatcgttggcctgattcttccccaccagaggacaga

SEQ ID NO: 1070 - DNA, 527 bp, homo sapiens
  misc_feature (56)..(56): n=unknown
  misc_feature (297)..(499): n=unknown
taacttgagggacagcccccaaggcgccaggtagccttcaggggcgggcagggttnggggaggtaggagactcggaccggcagccctggctccagcttcatcatctgtgtcttccctctctggccaggctcttcgaggggatgcaggaggctgggcacggtgagctggcagggggcttggtcttcgggtgcccagcaggttgtcagctcctgtttctgatggactcacctgcaatgattccggcataaccgggacagctgcctgcacttgccactggtgaggatgatgatgcctgtnatgaacagcacagctgcgaccaacagcccccgtttccggagggtgtgttcatcatagnagaaggggtcatcctcatnnaaaccagatggnttganggtctgggggtctgtctggacgtctgtgcttggggatggtctctnaaagagcgtcgtggtgtcatcagtgggatcagctgctttggtgctcttgtgtgtctctgganctgtcactagaggcccatccgttccttc

SEQ ID NO: 1071 - DNA, 368 bp, homo sapiens
  misc_feature (25)..(25): n=unknown
  misc_feature (283)..(360): n=unknown
agaaagccaccacctgggagacctncccccaaagcccacagaactggcccccaagccccaaattggagatttgccgcctaagccaggagaactgccccccaaaccacagctgggggacctgccacccaaaccccaactctcagacttacctcccaaaccacagatgaaggacctgccccccaaaaccacagctgggagacctgctagcaaaatcccagactggagatgtctcacccaaggctcagcaaccctctgaggtcacactgaagtcacacccattggntctattncccaaatgtgcagtccagagacgccatccaaaaaggaagcatctggaggactcccaacgaccttcacggnttactctg

SEQ ID NO: 1072 - DNA, 377 bp, homo sapiens
  misc_feature (106)..(370): n=unknown
tttaaaaaatgtacaattccacttatccatactattcctttataaaaggcagatttcaggtaagcttctaaatgcatgcgtaatgtagaggctaatattttctggnagtccttggntcctgaaatttgaacttcatatgngttttaaacttttgtcaaaatagtcatgaaagatatgntatttttgcataatgaggnaatatatcaggggcgggcactcatnagncagtataaatccacttgtctaaacttgcatgaggctgtgtncattgtaaaatgccataaagagntttgggncagtgaatattttgctgaaggaataacacttacatttaactgagcacttttctgtaataaataccaaagtangnttttgga

SEQ ID NO: 1073 - DNA, 465 bp, homo sapiens
ctgggactgaagagggacgggtcccgcggcgagcgagctcctgagcataagctgtggccatgactactgaagtaggctctgtgtctgaagtgaagaaggactctagccagttaggaacagatgcaaccaaggaaaaacctaaagaagtagcagaaaatcagcagaatcagtcttccgatccagaggaggaaaaaggttcccagccacctcctgcagctgaaagccaaagtagtctacgccgccagaagagagagaaggaaacatcggagagcaggggtatttctcggttcataccgccatggcttaagaagcaaaagtcatataccttagtagtggccaaagatggaggagataaaaaagagcctaccccaagctgttgttgaagaacaggtcttagataaagaggaaccccttccagaagaacagagacaggctaagggtgatgctgaagaaatggctcagaag

SEQ ID NO: 1074 - DNA, 430 bp, homo sapiens
  misc_feature (14)..(34): n=unknown
  misc_feature (190)..(423): n=unknown
ctccttacttactnantcagtaggntgnancnnnactttgctcactgagggtttttcttccttgctcactgagggtttttcttccttgacttcaactttaatctcttgtttcttctgagccatttcttcagcatcacccttagcctgtctctgttcttctggaaggggttcctctttatctaagacctgntcttcaacaacagcttgggtaggctcttttttatctcctccatctttggccactactaaggnatatgacttttgcttcnnaagccatggcggtatgaaccgagaaatacccctgctctccgatgtttccntctctctctgctggcggcgtagactactttggctttcagntgcntgaggtggctgggaacctttttcctcctctggatcgggaagactgnttctggctgancnttctgct

SEQ ID NO: 1075 - DNA, 452 bp, homo sapiens
  misc_feature (397)..(419): n=unknown
cagaggcatgctctcttacagactaagagtttttaaggattcagggtgggagagtttaccagaggcttggactgcttctgtgtctctttaggtgtgcttatctgggagggagttgtgtgtctgtttccatacatcttcctgcagctgcaggcatacccccaggtctgcttttagcttccctatcttagtgcacctgaagggaaagaatgtgcttattaaggcccactgttatactggggcccaatgtatgagggtgaagtttggcaattacccaagagactttccccccacctccctctgtgcctgagctgtctcatctatgttttactgtctgctctttctgtctgcttgttgttagaagagaagtgattttcttgaaatgcatgaggctggaaanggagctggcacttaaagtggcngtgtttgtccgagaggatggtgctcctgctctg

SEQ ID NO: 1076 - DNA, 462 bp, homo sapiens
  misc_feature (270)..(432): n=unknown
cttcaataaagctttttttttttttaaaccctcacaatttagttctgggctctgtgcttgggctcttgaaattcggtggcagtggcctgaatccccatgcccactgtgacagagcaggagcaccatcctctcggacaaacaccgccactttaagtgccagctccctttccagcctcatgcatttcaagaaaatcacttctcttctaacaacaagcagacagaaagagcagacagtaaaacatagatgagacagctcaggcacagagggangtggggggaaagtctcttgggtaattgccanacttcaccctcatacattgggccccagtataacagtgggccttaataagcacattctttcccttcaggtgnactaagatagggaagctaaaagcagacctgggggtatgcctgcagctgcnggaagatgtntggaaacagacacacaaatccctcccagat

SEQ ID NO: 1077 - DNA, 363 bp, homo sapiens
  misc_feature (343)..(343): n=unknown
ggcaggaagcagagataagacttgaatttcagtttggtagacctccttctttagcagcccaacctgtagcaaatctagtttagcctgcatggcagggagagggattctcttcccaccctcaccatttgcaagtggcaggagctgagaatgccagtacgagagtgtagccaaagtgagaggctgagagcaaaggagacatttttttcagttttgagtcgagtatccagacagaggcaaatcattttgtttaactttttattaaagtgtaactatagaaacacatcaatgatttttcacaagtggagcacgtgcatacaatcgggcaccccagaagccccccgtnagattcccttccagttaact

SEQ ID NO: 1078 - DNA, 408 bp, homo sapiens
  misc_feature (26)..(385): n=unknown
attatacaaccatgagaatgaaaatncatgtacaaatacatgcaacaaaaatctcacaaacataatattggtgaaaagaaaccagatacgannnnnnnnnnnnnnnnnnnnnnnnnnnnnnnnnnnnnnnnnnnnnnnnnnnnnnnnnnnnnnnnnnnnnnnnnnnnnnnnnnnnnnnnnnnnnnnnnactggaagggaatctgacggggggcttctggggtgccgattgtatgcacgtgctccacttgtgaaaaatcattgatgtgtttctatagttacactttaataaaaagttaaacaaaatgatttgcctctgtctggatactcgactcanaactgaaaaaaatgtctnctttgctctcagccncncactttggctacacnctcgtactggcattctcagctcc

SEQ ID NO: 1079 - DNA, 476 bp, homo sapiens
  misc_feature (132)..(465): n=unknown
ctgctcttccacgtgacagatggcagaggagagaggtctccatgctgttcttctgcctgaagccacgccagaaccaccaaagggaaccagaaggggaactccgtccccatctctcaggaaataaggccaganctagaaccccccannnnnnnnnnnnnnnnnnnnnnnnnnnnnnnnnnnnnnnnnnnnnnnnnnnnnnnnnnnnnnnnnnnnnnnnnnnnnnnnnnnnnnnnnnnnnnnnnnnnnnnnnnnnnnnnnnnnnnnnnnnnnnnnnnnnnnnnnnnnnnnnnnnnnnnnnnnnnnnnnnnnnnnnnnnnnnnnnnnnnnnnnnnnnnnnnnnnnnnnnnnnnnnctcttatagtcctcaactgatcggatgaggnccactcacgttatgaaggataaactgtttgttttacttcaagtctacgggcttanatgttagttacacagcgncatctagancagtgtttgtt

SEQ ID NO: 1080 - DNA, 342 bp, homo sapiens
  misc_feature (138)..(337): n=unknown
actacagttttatccctaaagtttacataagcaagagttcagagtaatcgaccctggtattttgattacttaattttaaatgggaagtaaatgtctcgggccagcagtgtgcccaaggatcctgaaaagtagagcaanaattgtccctgactcagggggaggnnnnnnttngnnnnttntgnnactnnnnnactnnagccttganntcttactggntccaggggttgncagcttctaggaagacagcnccacagctcanaaggtttcttctccagccagcactgtgtctgtgtctcactaggaatggcccatcgctgcatctcctcctgtggcnctngtgtc

SEQ ID NO: 1081 - DNA, 469 bp, homo sapiens
  misc_feature (179)..(179): n=unknown
gcatcgtcacctcccgagacatcgactttcttgctgagaaggaccacaccaccctcctcagtgaggtgatgacgccaaggattgaactggtggtggctccagcaggtgtgacgttgaaagaggcaaatgagatcctgcagcgtacaagaaagggaagctgcctatcgtcaatgattgcnatgagctggtggccatcatcgcccgcaccgacctgaagaagaaccgagactaccctctggcctccaaggattcccagaagcagctgctctgtggggcagctgtgggcacccgtgaggatgacaaataccgtctggacctgctcacccaggcgggcgtcgacgtcatagtcttggactcgtcctaagggaattcggtgtatcagatcgccatggtgcattacatcaaacagaagtacccccacctccaggtgattggggggaaacgtggtgacagcagcccagggccaaga

SEQ ID NO: 1082 - DNA, 305 bp, homo sapiens
  misc_feature (77)..(77): n=unknown
  misc_feature (219)..(258): n=unknown
tattccaagtatttaatacacaatgacgcaactgtgatcccaagtgtgcaaagttaaagccttcgactgcagctgangagaagggaggaatggttcacctggggacggtggtgagtcaggaatgacaggcaggcggccatgaccagggcagtctcctacccatggccagggacaggggagcggcctgaggagcaggacccaagggtagcccagggccgnggaagggggcagagacctccccttggcctaggtcagganctcagaagtgccacatggctgaggggcagcggcccgggaagggccag

SEQ ID NO: 1083 - DNA, 304 bp, homo sapiens
  misc_feature (39)..(267): n=unknown
aagaaatttagcctgggtgcctcagcaacaaagtctgcngttcctaagagccacattttggggaagtggggtgacccaaacttggngacataggttgattgatcagagcctcaggcttacaagcaagagctcatgcagatccacagagccatgcncatcctgtcttcctgaccttcctcaggtggcaccacctgcgccccatgganctnctgnatcggtgtcatgtggaggtctgatgaatcctttaaaacctaactgtgatgtcgnaaatgtaactgtgctactttatatctactgaagggca

SEQ ID NO: 1084 - DNA, 543 bp, homo sapiens
tgagaatgagagaaacatatagcactgaagtgctgtgtttccactttattaaatcatcacagtaaatcagaattaaagagtaaaagaggttaactggagagtcgggtggctgccatcagtggagatgtgtgctttctcggtgtggctgcctgggccgcggtgtgtcctggtgcacacacgtctgcaaggtgttcccaccacctaggaaggaacctagatgtggagcattaggaaaattaaataacaagagacagcaaaataagaatcaaatgacacgctataacttaatttaccatatttatcaaattttttccttatttacatgtactaaacattgtagacctgaaaacataaggaaacattcacttcatgtgtatgtcatatggacagactgagtgcaactaaaacgatggttgtttcatgttgaatttccctcggatgcagacgctgcccttcagtagatataaaggtagcacagttacatttacgacatcacagttaggttttaaaggattcatcagacctccacatgacaccgataca

SEQ ID NO: 1085 - DNA, 288 bp, homo sapiens
  misc_feature (24)..(24): n=unknown
gagaatctctgtgtaaatcctggntcataatcagtctcctttttatcagttttggtgtggagaaagaggccagtttaaataggctttcaagagtctagggtcagaaaagcaatagtcactaagctaggtgacctgaaagctttaattttcatgacctggatatgtggtctattgtatatctttttctgaaatggttgtattcatttaggttagatcaatcagcagatattgggtccggtataccaggtattatttggggtaagctaacaagtacaactcatgtttgca

SEQ ID NO: 1086 - DNA, 229 bp, homo sapiens
  misc_feature (45)..(212): n=unknown
aataacaagtttaatattgaaaatctgaaaaaggcaggaagatangaagaagaaaaatatcaaccatagtcctaccacctaaagaacactcactgncantgtggccatactcattctttaanccttaatttaggtcccatttctggccgtggtgncnttccacgaattcctcccccagatcttccangntcatatctgtaccactcanttgnacatatcatacactttt

SEQ ID NO: 1087 - DNA, 498 bp, homo sapiens
ggaaaacttggtgtgcctcctggtgtcacagaactggatcctctgcataccccagcttctccacatgccactgctaggggtacccagctgctgccactcctgctggagggtgaactggggaccctgcaccctccgggaagccatggagtctgctggaggcaccatatcagcctgcgggactagggtggggagcaaacaggccagcggtggaggtctggacagttcaagtgtgatgcagctgtggcaaggagaaatccttccgcctctgggcctcaggctgcctgtccataaaatggggacatggccagctgacggacaactgagtctccggcccacctaccactgccactccaggatcccccaaagtgtgcagagggctcagcagagaacagtatgggaccccctccaccaggcctggaacacctccagccacaaagaagccaaaggtcagtccctctgctccccagcaaacggtgcctcccaggcattcttcagtgc

SEQ ID NO: 1088 - DNA, 426 bp, homo sapiens
  misc_feature (16)..(73): n=unknown
  misc_feature (308)..(413): n=unknown
gtacagcgacaccagnctgtgcaaagcccagtgtcgtcttcactgagcacattccccaggacgcctggtgcanccctcctctgccccaggccccaactagccacccctgtgcccactagcaggccctgtgccttcacagggatgaagccctggcactgagaatgcctgggaggcaccgtttgctggggagcagagggactgacctttggcttctttgtggctggaggtgttccaggcctggtgagggggtcccatactgttctctgctgagccctctgcacactttgggggatcctggctggcagtgntaggtgggccggagactcagttgtccgtcagctggccatgtccccattttatggacaggcagcctnaggcccagaggcggnagggatttctccttgccacagctngcatcaacacttg

SEQ ID NO: 1089 - DNA, 209 bp, homo sapiens
actaggcctgacctccccttcccctttcctgccccaaggcagatccacatcaccgaagctccctagaggggcaaaagatggagtgagccacaggaagtttggggcgtggtgagttggaatgatacgtccatttctctatgaaatatttgctactagactgttcatttctctctgacatgtttgttgaatgaataaataatttgaaactt

SEQ ID NO: 1090 - DNA, 69 bp, homo sapiens
  misc_feature (3)..(49): n=unknown
ganagaaatgaacagtctagtagcaaatatttcatagagaaatggacgnatcattccaactcaccacgc

SEQ ID NO: 1091 - DNA, 357 bp, homo sapiens
  misc_feature (188)..(188): n=unknown
gtgataaggatcatgccctccacgatggtgaaatgaaagtatttgatgtcggcctggtgtgtggaattgtgggcccacacatttctcttcctctctcagatcctggtgtatagcctggaagcaggacgccgcctcttgaagctgggtaacgttctccgtgacttcacgtgtgtcaacctcagcgacanccctcccaacctcatggtcagtggcaacatggacgggagggtgaggatccacgacctccgcagtggtaacatcgccctgtcgctctccgcccatcagctcagggtctctgctgtgcagatggatgactggaagatcgtcagtggaggcgaggaagcctggtgtccgtgt

SEQ ID NO: 1092 - DNA, 310 bp, homo sapiens
  misc_feature (92)..(307): n=unknown
taaattcaggagtgtctggaattgtcttattttgctttttgttgatttctcactattctgcattggagtcaattcctagaaaagcagggccntgcctganggtatatcccatagggtgcagtgtcttggggttgggggattctataatttggcctgtatggtgtnantctttgtgcatcngagctgntctttgtggccttcgtacagggtaggttntttgtgnatcgtctatgngtatttganattccatacccanntactggatccagcttgttagcgatactaagtaaatcctccagatcnttanatt

SEQ ID NO: 1093 - DNA, 424 bp, homo sapiens
gtgcccctggtcctgctggagccacaggtgaccggggcgaactggggctgctggtcctgctggtcctgctggtcctcggggaagccctggtgaacgtggtgaggtcggtcctgctggccccaatggatttgctggtcctgctggtgctgctggtcaacctggtgctaaaggagaaagaggagccaaagggcctaagggtgaaaacggtgttgttggtcccacaggccccgttggagctgctggcccagctggtccaaatggtccccccggtcctgctggaagtcgtggtgatggaggcccccctggtatgactggtttccctggtgcttctggacggactggtcccccaggaccctctggtatttctggccctcctggtccccctggtcctgctgggaaagaagggttcgtggtcctcgtggtg

SEQ ID NO: 1094 - DNA, 435 bp, homo sapiens
  misc_feature (58)..(62): n=unknown
aaaggttgacattttccataacaggtgtaagagtgttgaaaaaaaaattcaaattttnngnnggagcgggggaaggagttaatgaaactgtattgcacaatgctctgatcaatccttctttttctcttttgcccacaatttaagcaagtagatgtgcagaagaaatggaaggattcagctttcagttaaaaaagaagaagaagaaatggcaaagagaaagttttttcaaatttctttcttttttaatttagattgagttcatttatttgaaacagactgggccaatgtccacaaagaattcctggtcagcaccaccgatgtccaaaggtgcaatatcaaggaagggcaggcgtgatggcttatttgttttgtattcaatgattgtctttccccattcatttgtctttttagagcagccatctacaagaacagtgt

SEQ ID NO: 1095 - DNA, 410 bp, homo sapiens
aaacaacaggcaaacaatggaggatttaatttcactgtggcagtatgatcacctcacggctacctatcttctgcttctagccaagaaggctcggggaaaaccagttcgtttaaggctttcttctttctcctgtggacaagccagtgctaccccattcacagacatcaagtcaaataattggagtctggaagatgtgaccgcaagtgataaaaattatgtggcgggattaatagactatgattggtgtgaagatgatttatcaacaggtgctgctactccccgaacatcacagtttaccaagtactggacagaatcaaatggggtggaatctaaatcattaactccagccttatgcagaacacctgcaaataaattaaagaacaaagaaaatgtatatactcctaagtctg

SEQ ID NO: 1096 - DNA, 527 bp, homo sapiens
  misc_feature (479)..(482): n=unknown
tggtgctctccttaagaccttcccgctcgatgtcggcagcattgtagggtacagcggtcagaagaaggacactgaaatcttctatcagtttacttcctttttatctccaggtatcatttatcactgtgatcttaccaaagaggagctggagccaagagttttccgagaggtgaccgtaaaaggaattgatgcttctgattaccagacagtccagctccccaagggtactgagtcttccagaaactgaatcactggttgattgatgatgacgaagaatgtctctgttcctttgcaatgagaggtcaccaatagggcaccaggtgtttatcaaggcccctcccacctggagggctggaccacacaggccacagattaggaatcagaacattgtttgtgaaggaagatgagaataaagagcgctggatgttccccacaatgtttctgtgaaactagggcattattatagcttggtgaattanccntcaattgtctagaaatggtctagatgataggtacatctagttctg

SEQ ID NO: 1097 - DNA, 370 bp, homo sapiens
  misc_feature (160)..(367): n=unknown
acgttgattgaaaaaaatagattatattctattgccagatcttgaatataccttatctcttaataatcccacaggaatcctaaaaaacagatactatcaatctctactttacagttgaaaaaactgtggcagaaaggttaaatgacttgccccacgtggntttcagggctgtctgacagagcttcttgaccctgtatgtcttctcggcccngtatgtctatcaagaatgttgtacttttaaatgcnatttacatagatgaagattctgcaaactttttcttaaagggcatatattaaatatttcagggcttctggggacatagagtttctgttgcnaccactctaagtggcnaagcaaccacaggcnata

SEQ ID NO: 1098 - DNA, 333 bp, homo sapiens
ggcggcgtggagcagcgcgcgcaacgaggccaggggaaggtgggcgcaggtgaggggccgaggtgtgcgcaggactttagccggttgagaaggatcaagcaggcatttggagcacaggtgtctagaaacttttaaggggccggttcaagaaggaaaagttcccttctgctgtgaaatatctggcaagaggctggagggcccaatggctgcaaaatcgcaacccaacattcccaaagccaagagtctagatggcgtcaccaatgacagaaccgcatctcaagggcatggggccgtgctgggaagtggactggttttcactggcgagcgtcatct

SEQ ID NO: 1099 - DNA, 327 bp, homo sapiens
  misc_feature (286)..(313): n=unknown
cttggtgccaaaatctgggccagggggactccttcgtgagaccggccccctgtcctggccctcattccgtgaagagatccacctgcgacctcgggtcctcagaccagcccaaggaacatctcaccaatttcaaatcggatctcctcggcttagtggctgaagactgatgctgcccgatcgcctcagaagccccttggaccatcacagtgccgagcttcgggtaatcttacggtggaggattcccagccatatgaagacaccctagctggacgatcagtccttgtcnaaagtctgacccctcaaactctacagnctcaatggaccaga

SEQ ID NO: 1100 - DNA, 451 bp, homo sapiens
  misc_feature (210)..(431): n=unknown
aggaataatgttttatgtaccaaagccttttgtccccattttccatcatacgaatagtattccctgttgctaagccgatgatacattacccttttcccataggtgtgagtggcggtctgaatggagaagttcaatagttctgattgcagatcctatgcagaagagataataaggaaaataatctttgtctcctggattaagctgaggctngcaaagagtgaaatgtcccaagccctctaacaacaaacaacatactttgtggtgtcctggatgctggtctggntgccaaatatgtggaactgggccccatatgcgtggtactgttggtccatttcatgagagtangcttgangacaccatgggcaangatctgatggttgccagcctaagcgttttagacttttgacccagagatttttggtttgggtggnggaaaaaatttagaggatag

SEQ ID NO: 1101 - DNA, 392 bp, homo sapiens
  misc_feature (304)..(373): n=unknown
gtggatctggggcctctgatactttgcttcctaaaacagcccccagttttcggcttgccctatgagatgatgttcatgtgcttccttgaaaccaggtggaaagaaaggggaagaattaattttctcattctgttgctgttgaacgtaatgtaatcttaatactgtagccttcctagaagcccttccctctttttcatgctgtaaagtcaaatatttgatatccttaacataaattttaaaattaaggtcataggaagcaaatgtctatttccaaagcaatgagcttgttgtgactgtgatttantcttctatagtattttttcctcatttaattgagaggagaaaataatactcctttgcaatatccttaggntctcccctttccccctggt

SEQ ID NO: 1102 - DNA, 240 bp, homo sapiens
  misc_feature (149)..(239): n=unknown
cattttatacaattttcaacatttatactttcaaacaaaatgagcaaaaaatacactaagtgctaaaaaaatcaaaacagaagtaatacaattttaatttcaatattttaaaatacagaaattggaaagaatactaaatacaactttanacaagtcacttgtcctcccctatnataatcantgtaagctactnanagggttacnaatttgaagngaggcaganacggngtaaatacngng

SEQ ID NO: 1103 - DNA, 493 bp, homo sapiens
  misc_feature (388)..(476): n=unknown
cagccccaggaaatgcccagtttggccagggctcaggacccattgtcctggatgatgtgcgctgctcaggacacgagtcttacctgtggagctgcccccacaatggctggctctcccacaactgtggccatcatgaagatgctggtgtcatctgctcagctgctcagtcccagtcaacgcccaggccagatacttggctgaccaccaacttaccggcattgacagtaggatctgaatccagtttggctctgaggctggtgaatggaggtgacaggtgtcgaggccgagtggaggtcctgtatcgaggctcctggggaaccgtgtgtgatgacagctgggacaccaatgatgccaatgtggtctgcaggcagctgggctgtggctgggncatgtcggccccaggaaatgcccggtttggccagggctcaggacccattgtcctggatgatgtgcgctgctcagggaatgagtnctanctgtggagtgcccccac

SEQ ID NO: 1104 - DNA, 442 bp, homo sapiens
acagtgctaagaagtaagtattgacattttcattttgcagatgagaagcatggattctgggacgtcaggtctatgggccatccaggtcagaactctcttgacctcaccctgcaacgggtcctccaaggaccatgagccttgggggaggcgggaaccaggtctgattcaactccgtatgaccaggtgcagcacaatgtagggctcaatctgagttggaatatgacaccaagaggaacatcccaagtccccgagtcaggggtctgcgccccggtggacagtggggtctgagagcgaccacctaccgaggctcctcttctcggcgtgggggggtctgcagctggatgggacccaggacgaggtccaccttttcctggtaggagcccacatccctcttcgacctcaacacacagcctcggtagcagcgggaagaggggtcatacgc

SEQ ID NO: 1105 - DNA, 574 bp, homo sapiens
  misc_feature (549)..(560): n=unknown
aagattacaagactgggcttggtggcctgaagacaggggtgacttgcctttgagaaaagaagggctgcaatgccaccagagaacgtgatgtcagacaccatctgtagtgagcagcgcaccagatgtagcgtgctacagtcagctttagctctcaagagtcgtatgtaactgtcccagactcctctgtcagtttcagcaactacaagggataccctgcgaaagtaccatgagaaatatcagagtaaaactttctagaacagtacaaggttaaagaggtgaggtgacgggaaatacacagcatagctttgaaataatgacaaccaaggacatgaccattagaacagcatgtgcagatcttaatcatcccagttcctaggcaacttgttcaccaggtacgcaagggccgaatagttgagaatggacatttttacctactcctcctagccccctatccccagtaacagtgatccttttcttattgtgatttatttcctaattcttgctgagttgactttcccttgtaggaaaagaaaaatattcaaatagaanccaccttttanttaagtatgaagca

SEQ ID NO: 1106 - DNA, 431 bp, homo sapiens
atgcatacaagcacaggcaaaaacaagggtcagtaagttgccactgaaaaccatgaaatggggataattagttaactccaacaatgtgagttgttttatgtgtatatcagatgacaatattttctgaaaaaatacccataattcactctctataaataaagctgtaattcttggctataagacagcagaccttggtgtgagtatagtcccagaattaatcatcctttgtgcatacaactctttagcaaagcttatcaatttaagcagtctactttggctcagattctaccagcttacagctcagatcagtatctgatgctttatttaattcctgctcagtatatgctaatggagacactttggaatcattctacaccattgaaagataattcattttttaaaaagtaacagtgcttcatacttaaataaaa

SEQ ID NO: 1107 - DNA, 441 bp, homo sapiens
  misc_feature (432)..(432): n=unknown
gacagttcctggactgatttcttcaacccaatctcacaccccatgggacgaggtcatcaagcaggaagaaggatggatatggactccagtcatagtacaacgcttcagcctactgcaaatccaaacacaggtttggtggaagatttggacaggacaggacctctttcaatgacaacgcagcagagtaattctcagagcttctctacatcacatgaaggcttggaagaagataaagaccatccaacaacttctactctgacatcaagcaataggaatgatgtcacaggtggaagaagagacccaaatcattctgaaggctcaactactttactggaaggttatacctctcattacccacacacgaaggaaagcaggaccttcatcccagtgacctcagctaagactgggtcctttggagttactgcagttacngttggagat

SEQ ID NO: 1108 - DNA, 420 bp, homo sapiens
  misc_feature (398)..(398): n=unknown
aacaatcagtagcacattgcatctgttaagtgtcccagctccctgtaatggttatgtttccaacggttgtttctttccaagataatggtgtaggtgttacaccccaatcttcatgtccacattctgcaggttccttgtctcatcagctgtcataaactggtctggagtttctgacgactccttgttcaccaaatgcaccatttcctgagacttgctggcctctccgttgagtccacttggctttctgtcctccacagctccattgccactgttgatcactagctttttcttctgcccacaccttcttcgactgttgactgcaatgcaaactgcaagaatcaaagccaaaggccaagagggatgccaagatgatcagccattctgggaatttggggtgncttataggccaagaggttgtgt

SEQ ID NO: 1109 - DNA, 496 bp, homo sapiens
aagaaaacatgtcaggacacaaatgcagttatccctgggacttacaggatcgatatgctcaagataagtcagttgtaaataagatgcaacagaaatattgggagacgaagcaggcctttattaaagccacagggaagaaggaagatgaacatgttgttgcctctgacgcggacctggatgccaagctagagctgtttcattcaattcagagaacctgtctggacttatcgaaagcaattgtactctatcaaaagaggatatgtttcttgtctcaagaagaaaacgaactgggaaaatttcttcgatcccaaggtttccaagataaaaccagagcaggaaagatgatgcaagcgacaggaaaggccctctgcttttcttcccagcaaaggttggccttacgaaatcctttgtgtcgatttcaccaagaagtggagacttttcggcatcggggccatctcagatacttggctgacggtgaaccgcatgggaacagtgc

SEQ ID NO: 1110 - DNA, 538 bp, homo sapiens
  misc_feature (428)..(504): n=unknown
ttaaaatggcacataattattaaaacagcatactgatcactttatacttctgctagcccccaggggagctgctgggggcggcatgtgagtgccctcccgaaagtacagatttcatgcattgagcaattcgtgttctttatcggttttcccaacagcatcaggatttgagagtgggtcgaggtcagcgaagaggctgaaccaggcagtcaggtctgaggcagccttagcaggttcttgtagcgaggcctgtaagtctttcatattttggtctaaaagctgcgaaggaaggaaacctgagcctgtctgggccttggggtctggctctcccagggccatagtgggcactggctccttcacttggccgtctccaaacacagcggcccactctttgctgaactcgccctcttccaaggaggaagcattgaagntctcactcaacagcagcaggtcatctttgtcagcacttcaggttccgggggncctgccactngtcccaagcaagcngctttctcagattcatgtcctaataggttcatcc

SEQ ID NO: 1111 - DNA, 461 bp, homo sapiens
  misc_feature (130)..(130): n=unknown
  misc_feature (422)..(422): n=unknown
gcttctatgaccaaaatgagttgtaaattctctggtgcaagataaaaggtcttgggaaaacaaaacaaaacaaaacaaacctcccttccccagcaggctgctagcttgctttctgcattttcaaaatganaatttacaatggaaggacaagaatgtcatattctcaaggaaaaaaggtatatcacatgtctcattctcctcaaatattccatttgcagacagaccgtcatattctaatagctcatgaaatttgggcagcagggaggaaagtccccagaaattaaaaaatttaaaactcttatgtcaagatgttgatttgaagctgttataagattaggattccagattgtaaaaagattcccaaaatgattctggacactagatttttttgtttggggaggttggcttgaacataaatgganaatatcctgttattttcttagggtacttgggtagtaaat

SEQ ID NO: 1112 - DNA, 298 bp, homo sapiens
  misc_feature (13)..(13): n=unknown
  misc_feature (145)..(295): n=unknown
ttatgtacaaaanactttgagatatcaggcaccattaaaccacatttccccccttataaatgcaactgttcaagtacactgggaacagttttaaggtacacctgcagtacaataggagaagcatgagtggataatctaaacacangatcataacagtgatacgctgcaacacctctgtganttccattanccaagttctgtcattaaaacatagnaaactactgctcctcaaaatanaagttttaggagacaaaaatccctncgtagtggactgttttccnagcagagctcctantgt

SEQ ID NO: 1113 - DNA, 324 bp, homo sapiens
  misc_feature (41)..(41): n=unknown
  misc_feature (240)..(240): n=unknown
tgccgttgttctgggtactacagcagaagggtatgcggaangagcaccccagtctgagatggctcctgccggtgtgagcctgagggccaccatcctctgcctcctggcctgggctggcctggctgcaggtgaccgggtgtacatacaccccttccacctcgtcatccacaatgagagtacctgtgagcagctggcaaaggccaatgccgggaagcccaaagaccccaccttcatacctgntccaattcaggccaagacatcccctgtggatgaaaaggccctacaggaccagctggtgctagtcgctgcaaaacttgacaccga

SEQ ID NO: 1114 - DNA, 510 bp, homo sapiens
  misc_feature (10)..(497): n=unknown
aaataaccanctatggttccgcattcaaacagaanttcaggtgcttgcatcnntcangtattnttcaaanatcacaagcatctgtggaaaaaactaaggtattacagncactacacggangtcatnttcttacattcangncactaantacnnaccgaaggcaatgcaaaaatgtntactttaattttannncccaatttttntnctcaacttgaaaagggancacttttttgnttcacnaacaagctggtcggttgganttctttttggaacagtagtcccgcgctaaacactggttcttgcctcnccaccnccattctctaaaatnnncccagcnaactgggaggtgcatttntgccgcngcaggcttctactgntcactccatgcagcacacttanaccaaggagaaacggctgcnttncagctcaaagtcgnctcattagaaganaaggtgggngactgggggtgacacatcgctgattcgtccggggttgtnatctgctgtggct

SEQ ID NO: 1115 - DNA, 397 bp, homo sapiens
ctcagcacctggatactcttcagagaactgcaaacaaagaaagtggaggtggatatgagcccccacttacaaatgtcttcacgatgcagtggtttctgactctctttgccacatgcctccctaatcagaccgttttaaagatctgggattcagtcttctttgaaggttcagaaatcatcctaagggtgtcgctggctatctgggcaaaattaggagagcagatagaatgttgtgaaacagcagatgaattctacagcaccatggggcgccttacccaggagatgctagagaatgatcttctgcaaagccatgaactcatgcagactgtttattccatggctccgttccctttcccacaattggcagagttgagggaaaaatacacctacaacattac

SEQ ID NO: 1116 - DNA, 373 bp, homo sapiens
  misc_feature (348)..(348): n=unknown
cgtcagttagcaagtagctgggaaaacagccctgttctaactcctattataaaacttccagttcccattttttatgggctgttgctcatccctgaacctattcattttcactggacaaataaaactcttttagagccattcagctgcaacccttatactactgtgaaaaggtgagtccagatacaaagtttcggggagacatcatcgttttttagtgccactgtttccaccgccgggtttgctgaagctcctactcatttgaggaaagtgcacagttggggttctttctgtagggccatataatcccaagttcctggcagtagcagatttccgcagggcttgacgctnggaaaagggctaaagatggggtttt

SEQ ID NO: 1117 - DNA, 417 bp, homo sapiens
  misc_feature (323)..(373): n=unknown
caaacctgtgatctagtccttgtcttgtaattgtggattaatgtcaatgttaatcagcccctcaaagggagagaaaagctggaccttttcccttgctgtaccatattcagcatttgatttccatgggccccaccatttatgtgtagaatttgaaatggttgtcacctctctctgaggacagagcttgaagcctccacaccagctgctgctggagattcaaagcccaactgtgggtccgagagggaagctggctgggctggctgaagaatgaagaccactggactctccgttaatctctaaggggtctgctcccccaggaacgnttctgaacaatggggactttgttggtagccattggtagatgtccttttcnaatttataagtgacttaaactttcccctggctgttaagaagttt

SEQ ID NO: 1118 - DNA, 594 bp, homo sapiens
cccggggttgtgggcaccttgctgctgcacatataaggcgggaggttgttgccaactcttcagagccccacgaaggaccagaacaagacagagtgcctcctgccgatccaaacatgagccgcctgcccgtcctgctcctgctccaactcctggtccgccccggactccaagctcccatgacccagacaacgtccttgaagacaagctgggttaactgctctaacatgatcgatgaaattataacacacttaaagcagccacctttgcctttgctggacttcaacaacctcaatggggaagaccaagacattctgatggaaaataaccttcgaaggccaaacctggaggcattcaacagggctgtcaagagtttacagaacgcatcagcaattgagagcattcttaaaaatctcctgccatgtctgcccctggccacggccgcacccacgcgacatccaatccatatcaaggacggtgactggaatgaattccggaggaaactgacgttctatctgaaaacccttgagaatgcgcaggctcaacagacgactttgagcctcgcgatcttttgagtccaacgtccagttcgttctc

SEQ ID NO: 1119 - DNA, 585 bp, homo sapiens
  misc_feature (104)..(139): n=unknown
ctcgaggtacaaatgaacatgctccccaccccactctgagttttttgcagaagcagcaggacatggctcctctgctaaaataaatacagttcacactccaggcnnnnnnnnnnnnnnnnnnnnnnnnnnnnnnnnnnnngtctcaatgggataaaaatgagaacacaaccgcacaaggccaaatgggagctgcacatttcagaaattagataattaacaattcatctgatgccgcaggaaaaggtgaaatgcttctggtcctggaatgtgtgagagatgacccagaggtttcagaagttctgctgtttttgatgtcccgaggctctgtggtgagaaggcccagagaacgagctggacgttggactcaaaagatcgcgaggctcaaagtcgtctgttgagcctgcgcattctcaagggttttcagatagaacgtcagtttcctccggaattcattccagtcaccgtccttgatatggattggatgtcgcgtgggtgcggccgtggccaggggcagacatggcaggagatttttaagaatgctctcaattgctgatgcgttctgtaaactcttgacagccctgttga

SEQ ID NO: 1120 - DNA, 306 bp, homo sapiens
cttgtaccaggcgagctctcgcctttgctagcaaaagagctcctctcttcccaaaccctgctactacgctgtccaccctgtatggtcttaggtctttgaggtttttttggaattcacttgctggagactacagctcacagaacgccctgggctggattgtgccagctgtagttcgcgaaccaaggacatttcctggaaatgcatgcggccacgtatctgtgacagaaatggcagttctcacgtgcgttacgtcccctggaaggacttggaaatacggaacttgagtgagcactgagaggacacaga

SEQ ID NO: 1121 - DNA, 377 bp, homo sapiens
  misc_feature (97)..(97): n=unknown
  misc_feature (346)..(346): n=unknown
caagaatggaagaatgggtaaagtctacagtccatttctagactggtcatgagactcatgtttatgatgatggacttttgatctggtggagggaccnaaaccttccagttctgaagctcattagtggtcctacctgtgtgacaggcatttactattggactggcagtcccaggacaaactccaggaatccccccatgtccatctctactcctgccctcttttacgtagcagcaatcatattttcccttgatagggttcatcattctagatactccgatgacttctttataatgagcctgaagtggcctggtggctgcctcagcttccagttcagttgaatagctantacgtctttgaggatgtgccccttgctgggg

SEQ ID NO: 1122 - DNA, 497 bp, homo sapiens
attctacattctacgtaaaagctcaaatcgccagatactgttattactattttaggagggcttggctaatacaaatctggaccaaatgttggcccatgctaaattatatcaaaagaccaaacatccaagaaaggcaggaattcaaagatttcagaagataaaaatgcttgattgggtccctggcatgcaaccagcccatcaaccccctcactgccctctggcaggacccagaagatgagctcccttcttgccacgagaaatacattcatgaggctctgctgattttcctctctaggcctgggaggctgcttgaaagagctgctgtgaacgtgggctccctgatctcagcaacagagatagacagaaggaacaaaatagggcgctcatcgtaagggataggggcatggaaaccagacctcgagctgtgggtcccaggaatgaaaaaggccagacgcccctaagatatgggctagtaatgaccttaactaaagacttct

SEQ ID NO: 1123 - DNA, 626 bp, homo sapiens
  misc_feature (2)..(47): n=unknown
  misc_feature (205)..(205): n=unknown
  misc_feature (597)..(597): n=unknown
gnagaggggtgagattctgctggaaacaagtcaattggctaaaatantcttttaatcacattttgtggaccatcttctgcttagttttgctcttttatgtttttatttgcttgttcatatatacatacattaacctgcaacaactagaagaacatttaccaaaatattaaccaacagtgactatcttttgatgtggtgggtttangggaggaagtatgtttttctgtgttgctccaagtttttctgtttaaagcatgtattttgtaatgtttgggggaaaccaaatccatcaaaataaagtgcaagttttgtaacctgaaccactcattgaggtacagaattgaaatgtatttagatgaaactcacaggtattttttcttggagaatgtggaatattttatctatagtgcagctgtgctgtcatttatgccattttttcctcctcattgtgattcttactgtttggggtgaaagatgagtagtatttaaagcccgtaatgtgtgtgagtacacacgtgacatcttagtaagattcatttgtgtgagaaataagggaatttaggcttttggggtacattgtttcaaaacatgtaatangtgaccaaaatccagttgttagattgtag

SEQ ID NO: 1124 - DNA, 477 bp, homo sapiens
  misc_feature (466)..(466): n=unknown
gcacatgccaccctgctggctttcaccaaacttttatttaatcagggctatcatgtaagtataaaaaagtttcattccaggcagactacatacaaatctaaacaaactggatttttgtcacctattaacatgttttgaaaacaaatgtaacccaaaagcctaaattcccttatttctcacacaaaatgaatcttactaagatgtcacgtgtgtactcacacacattacgggctttaaaatactactcatctttcaccccaaacagtaagaatcacaatgaggaggaaaaaatggcataaatgacagcacagctgcactatagataaaatattccacattctccaagaaaaaatacctgtgagtttcatctaaatacatttcaattctgtacctcaatgagtggttcaggttacaaaacttgcactttattttgatggatttggtttcccccaaacattacaaaatncatgctttaaa

SEQ ID NO: 1125 - DNA, 509 bp, homo sapiens
  misc_feature (30)..(30): n=unknown
  misc_feature (485)..(485): n=unknown
aagaagcggaaaaagagtccagaaaagggtcgtgcagcaccaaagacgaagaaaatcaagaattctccctctgaagcacagaatttagatgagaatacaactgagggctgggaaaatcggataagactatggactgaccagtatgaagaagctttcactaatcagtacagtgcagatgtacagaacgcgcttgaacaacacctacattctagcaaggaatttgtgggcaaacctactattttagacactattaataagactgaattggcctgtaataacacagttattggttcccaaatgcagttacagctgggaagagtcactcgtgttcaaaagcaccggaagatcctgagggctgcaagagatttggctttggacactcttataatagagtatcgtgggaaagtcatgttacgacagcaatttgaggtccatgggcatttcttcaaaaaaccatacccctttgtgctcctctactccaaattcaatggtgtagagatgtgtgtgga

SEQ ID NO: 1126 - DNA, 147 bp, homo sapiens
  misc_feature (2)..(81): n=unknown
anggccncctgcngagnancnaagntctnctggtcatctataacctcttctttctcttcttctggtttttcttctggattntctacttcctcatgatcactggatacagttactttttctggaacttcttgtgattgctggtcatta

SEQ ID NO: 1127 - DNA, 556 bp, homo sapiens
  misc_feature (30)..(30): n=unknown
  misc_feature (485)..(485): n=unknown
ctcgcccccgactgtggagaagtgtccggngtagccccgttacaggtatcgctggctaccctcctccttcgcccctcctttcctcctttacattcaaatcaagtcggggttgaatttcgagaggggagtccgaggacctggggcctgatttctttttctctcgccatgcttcttcgggctgtgtacatgtgtggtggtgcctgagaggcgatacagggaatggctacactcttttactcccgcccctggccttcgtagtacccttgaagtgatccactagtcgtaacccctccttccatcaatgattcaattggagaagtttagaggagtggaaagacttgtccccttcccccatcgcaagcttggtcacagagtgtattgccaacccatgtatccagacgtcagtctaagggctcttggccctgggtagcgttttgaaaagggctggttatccttaagtactgaagattgataaagcccacttncttacttaaaagaatatgccctgaaatgtgttttctgtgccactgacaccagaaatgccaattagaagaag

SEQ ID NO: 1128 - DNA, 499 bp, homo sapiens
  misc_feature (111)..(496): n=unknown
tccagcaatacaaagtgttgcattagtaccaccaaaaccaaaggaattggtgaggccaataaatcttttctcagttttccattcctgtgcctttagtggaacatagttganatcaaattctggttcngaacaatccangtttaaagtaggtggtagtttttgntaataanaagctaatgtggtnnaagctgnctngactgcncctgcagntcccagcagatgtccngttgctcccttagttnagganactgcaagggcatatgcatggtctttgangagangtttgatagctttgttttcancngcatctccnaanggtgtngaagtagcatgtgcattgatagaggatanctcctcaggctgcacanctgcatcttttaaagcagcagcnatacaccttaaggcaccnncnccttcangatcaggggcagttatgngancagcatcaccngagaatccataggccaaaacttctncatagntccgggctcttcnntga

SEQ ID NO: 1129 - DNA, 273 bp, homo sapiens
  misc_feature (198)..(242): n=unknown
ggttgaaaccatgaatgcggaacccacagatatggaggactgactgtatcttacacacagaaccaccctaggctccaaacgctccaagttacccagagagaagtgtctttgtctgttctctcagatctgggcagcaaatgattctaaagggactaagagaaaatattgcagtgttggtagcagacattaactgagcgngttagtgccaggccnagcactaagcacttnatcagttttttttncctcattttatcatcacattaatgctgtgca

SEQ ID NO: 1130 - DNA, 510 bp, homo sapiens
  misc_feature (154)..(230): n=unknown
gtttagccagtctgtcctccatcacgtggaagatttgtttgattctctctgaatccccagcacctggcctgggcctgatattacctgttaaacagatgtacgcttttcttttctttttttgctgggggaaggggatggagtttcgctcgtcacnnnnnnnnnnnnnnnnnnnnnnnnnnnnnnnnnnnnnnnnnnnnnnnnnnnnnnnnnnnnnnnnnnnnnnnnnnnnnctgcacagcattaatgtgatgataaaatgagggaaaaaaaaactgatgaagtgcttagtgctaggcctggcactaagagctcagttaatgtctgctaccaacactgcaatattttctcttagtccctttagaatcatttgctgcccagatctgagagaacagacaaagacacttctctctgggtaacttggagcgtttggagcctagggtggttctgtgtgtaagatacagtcagtcctccatatctgtgggttccgcattcatggtttcaaccctcgag

SEQ ID NO: 1131 - DNA, 370 bp, homo sapiens
aaaggatggctggtcacctagagtatctatagggataaaagtatagctaaaataacctacattttaggtggagataatacagctgcctaagcttaggtgaactgctttttgaatcttagtttgctccttcataaaattggattaatataataccaatttggcagagttttcaaaaaaaatgatgccacatcctgtgtttccaaacagccttacctttcaaaactctttttggaagctgtaaagataatcaagtgatacctgccattatgtaaaggaattttggaatccgtctttggggaaataaaagccataagagagatgaaagctaatactttgtagttaaggattttttccttgatgtatctaattg

SEQ ID NO: 1132 - DNA, 576 bp, homo sapiens
ctgggttccatgttgcaacttagataagaaaagattcttgtgagacctaaaataaaacaggaaagtttgtaattggctccagaaagatagtaaggcaatggaaaacaggtaaatgatttgccttaatctgttctaggatcttctattaatactttggcctacttcctttggtgctctccctgcttagtaccccatcttaacctgtggcctcttaagatttctgttgcctgtctcatctttctccatctcatctactccgcagaaatcaagatgttttttgatgtctcagaagaagcaggcaaaaaaaagaaaagacaagactctttcggccttccaattagatacatcaaggaaaaaaatccttaaactacaaagtattagctttcattctctcttatggcttttatttccccaaagacggattccaaaattcctttacataatggcaggtatcacttgattatctttacagcttccaaaaagagttttgaaaggtaaggctgtttggaaacacaggatgtggcatcattttttttgaaaactctgccaaattggtattatattaatccaatttta

SEQ ID NO: 1133 - DNA, 572 bp, homo sapiens
  misc_feature (506)..(564): n=unknown
ccttgaaacagcttcatgagtttgccatcacagagccattagtcactttccaaggagagactgaaaacagagaaaaagttgccgcctcaccaaaaagtcccactgctgcactcaatgaaagcctggtggaatgtcccaagtgcaatatacagtatccagccactgagcatcgcgatctgcttgtccatgtggaatactgttcaaagtagcaaaataagtatttgttttgatattaaaagattcaatactgtattttctgttagcttgtgggcattttgaattatatatttcacattttgcataaaactgcctatctacctttgacactccagcatgctagtgaatcatgtatcttttaggctgctgtgcatttctcttggcagtgatacctccctgacatggttcatcatcaggctgcaatgacagaatgtggtgagcagcgtctactgagactactaacattttgcactgtcaaaatacttggtgaggaaagtagctcaggttantgctatgggtaatgcaccagcnagcaaatatttatgtttnggggttgaaaatccaagntattaacc

SEQ ID NO: 1134 - DNA, 439 bp, homo sapiens
  misc_feature (97)..(417): n=unknown
aagcatgttagaaaacctgaagaaatttaaaagtttttggtttacaaaaagcatgtataaaaatacctgttcagacaaacaaagatctgatcattanattgcccagctttaagaatgccaaaaataactaaaatactgtcaatcaaatgagagggctacatgggtntattaaagtttattttaacaattttagctaagcagaatgtgctaatgtaattcaagttacagttactgccagataacataagaganaacattgtgtgtggccacttaagattatgcctcaaacagatactgtttcgtgcgcagaacagagttggggaacacagctgggntaagnttcaatggtaagcagcnctaaagatcaagaaaatccccaacttttctantaaccgctataccntatgnnanncaanntagtatctatcaccacactctt

SEQ ID NO: 1135 - DNA, 374 bp, homo sapiens
agcgaaggaagttatctgctgggaacacttgcatttgatttaggaccttggatcagtggtcacctcccagaagaggcacggcacaaggaagcattgaattcctaaagctgcttagaatctgatgcctttattttcagggataagtaactcttacctaaactgagctgaatgtttgtttcagtgccatatggaataacaactttcagtggcttttttttttcttttctggaaacatatgtgagacactcagagtaatgtctactgtatccagctatctttcttggatccttttggtcattatttcagtgtgcataagttcttaatgtcaaccatctttaaggtattgtgcatcgacactaaaaactgatcagtgt

SEQ ID NO: 1136 - DNA, 396 bp, homo sapiens
aactgggttttcctttttacactgatcagtttttagtgtcgatgcacaataccttaaagatggttgacattaagaacttatgcacactgaaataatgaccaaaaggatccaagaaagatagctggatacagtagacattactctgagtgtctcacatatgtttccagaaaagaaaaaaaaaagccactgaaagttgttattccatatggcactgaaacaaacattcagctcagtttaggtaagagttacttatccctgaaaataaaggcatcagattctaagcagctttaggaattcaatgcttccttgtgccgtgcctcttctgggaggtgaccactgatccaaggtcctaaatcaaatgcaagtgttcccagcagataacttccttcgctctcg

SEQ ID NO: 1137 - DNA, 137 bp, homo sapiens
caaaaatgttattgttagcctgtcacattggcctgtgtgctcttcctcaaacactctaagcctgctagcacttcatggtcttcactttcattcccactgccggcagtgcccttccctcagagattctttctgtcagg

SEQ ID NO: 1138 - DNA, 591 bp, homo sapiens
  misc_feature (579)..(579): n=unknown
agagaaccctggagttacactattatatggtctcattcagcattaacattcatgactttctaacaggccttgcttgaaatgatcagagccagagaatgttggagagaggatcttaagtagaaatgcctcagccagacaagcaacaattacttttgtgaaataagaaaagcaattgtgtaactttcttccttgtccagttactaaggatggttttatttacacctttagcatttcatttcaagaagttgatattaaagaaatcctcatcataataataacccatggagtaatgcatgtcaactctgcaaaactagaacgtagccactttaaatatacttaacacatgacagcattctcagtcttggtttcttcttgcagatgaagttgaaaggaagctcaatccaactctcagacaaaaagctttgtcagatatgccaaaatcccttttgtgagcctgtgtttgttagatacccaaatggtggtcttgtgcacacccactgtggccgccagcagacacacaaaccccagctcatccagtcctggcactcggacttgaaaagcttggcccaagggtgcganggggactccgag

SEQ ID NO: 1139 - DNA, 274 bp, homo sapiens
  misc_feature (7)..(23): n=unknown
aactctncnannttnctgttttngggatttttaggggttttccatgtacattcatagagcctggtcattccatgtacattcatagagcctggtcagcagcgaggagtccttgttgcgtatggacggaaggctccctggcacccagatgtctcccttcgtcctgggctgacacagagcatggtggtcatctgctcttcatgtccagcaggctcagaaagaactcggagttcccctcgcacccttgggccaagcttttcaaggccgagtgccagga

SEQ ID NO: 1140 - DNA, 608 bp, homo sapiens
  misc_feature (530)..(530): n=unknown
atttattcatctatcgatggacacttgggactatatgcttttatttaagagcattttaataaacatcagccttacccggttgatgaacaaaacagcatcattctcattaaggagagaaagcagcagattttcccgaacagaacttctgccttcagctttctggcataccctaaagcagtttcctacagttcatgctctgacccgaatttaatactcctatccagcctggcctcaggttagaatcacacatgtatcttgcaactacttgccgctaaaccccagcttaggctgaaccctttcttgagagcagagactattgctcacactgtaactagcatggtgcctgattcccactagggtctcagaattattcattaaacgagtaagtatcaggtactaaaactgtgccaaaatgtaaagacagaaacaattactaataaattgttactctattattatcagcgagaatacttttaaaagacaaatccactggaaaaccactcatgacactgatgatgctaagaaagggntaaactgctacttgaaaggcatgtgagagaatgtgtgtggtggggacagagttgaggaatgcaattcacagtatttgc

SEQ ID NO: 1141 - DNA, 283 bp, homo sapiens
agaatttagctgttttttatttccattaaactaaatttgaatgacagtttaaacaaactatttgtatgggctgatgcctagggttttagtcaagtaatccagaggctgttactatttatttctgactctacataaacaatattgtactcttaactatgaaggatgacaaaggatttgctttccactgagcaagtgtcattaggaaagcttctatgatgaattatctcttgaaactatttactgtacctctgcctgccatatgctttttattttttttcaggcc

SEQ ID NO: 1142 - DNA, 480 bp, homo sapiens
  misc_feature (163)..(163): n=unknown
  misc_feature (282)..(282): n=unknown
  misc_feature (443)..(443): n=unknown
caagtccaaaatttaatagcacctctgctgagaaatataatgccagggatctatttcagttctccacactccattggtcaccatgttcattcatgtctgccttctaaacatctcaatctagccctttcttcccccttctcagagccactgccatacttgaggnttccattgtctcctgattggactatttatattgccgtaacttcctaccttgattgtctattgccactctctttgccacctcccttctgtttaccaccagaaccgtgaatctaaaatatntcctcttcattaaaagtgaaagaacattatcacgtcatttcctgtttcattaaaagtgaaacattttttaaaaggaaaaataatagcccttcaaggtctggcgctaagctcattttctcgcagcttcaccatggtatctatcttgtattccagctgcaganctccacattcctcagataagtctttccttttttgtac

SEQ ID NO: 1143 - DNA, 377 bp, homo sapiens
  misc_feature (366)..(366): n=unknown
ataagaaacaggctgtactctcatctggggagcaataaaggcagatgtccctgaaaatgttttacttggaaaattattaattgctctttactgtcagccatttatgccttccagtcaagaacgaacgtgaaggaaatgtcataaaccttaaatgtcagcaaggattcacttgaggcctactaataaagatcagatttgaacactttaatgctaatatactttatcacagagtatcttattttactcaatggcaataaaaaaaataacagaacccttaaagggcatccacattgatttctcagtgtgtgattcattttgattactgatataactatacttaaaattaagcttctattacagaaagcnaaattacaaaa

SEQ ID NO: 1144 - DNA, 556 bp, homo sapiens
  misc_feature (466)..(466): n=unknown
ctcttttactgaaaaagcaggggatgagttccatcagaaggtgcccagcgctacttcccaggtttttattttttttttcctatctcattaggttggaaggtactaaatattgaactgttaagattagacatttgaattctgttgacccgcactttaaagcttttgtttgcatttaaattaaatggcttctaaacaagaaattgcagcatattcttctctttggcccagaggtgggttaaactgtaagggacagctgagattgagtgtcagtattgctaagcgtggcattcacaatactggcactataaagaacaaaataaaataataatttataggacagtttttctactgccattcaatttgatgtgagtgccttgaaaactgatcttcctatttgagtctcttgagacaaatgcaaaactttttttttgaaatgaaaagactttttaaaaaagtaaaacaaganaagtacattctttagaaactaacaaagccacatttactttaagtaaaaaaaaaaaaaaattctggttgaagatagaggatatgaaatggc

SEQ ID NO: 1145 - DNA, 473 bp, homo sapiens
agacagagtgcactaaatttaactttagaaaaaattagccgttgttcctgaattgtttttgttttgcttttcattcaacgatatcaacttgtaacttgtgtcacttgagttttaattcagcagtaaatcacctccactccatatctaagcagcgttgtcccaaaaacaaaaggggctgaggataattcagctaatggatgtccaaggttgtgctaggtttatttcttcacttgattgggtcttatggcatttcatatcctctatcttcaaccagaattttttttgtttttacttaaagtaaatgtggctttgttagtttctaaagaatgtacttttcttgttttacttttttaaaaagtcttttcatttcaaaaaaaaagttttgcatttgtctcaagagactcaaataggaagatcagttttcaaggcactcacatcaaattgaatggcagtagaaaaactgtcctataaat

SEQ ID NO: 1146 - DNA, 522 bp, homo sapiens
  misc_feature (480)..(480): n=unknown
cagagattaatgtcatcttagatgaacaattttttcaccctgctagtttccatttgggacatagggtgtttgctgtggtaccatgcatagacactcagagcttagcagagttatgtcagattatctctctaaaacaatgtgttgttccttaccaaaaaacgtaagcccctctggccggaccttattttggtcattatgggaggcagagcattccaaggtcaaatgacgggttttccatctgggaagtattcttttggttgctggtgtttccttgggagtggatgtaaaccttaagtagccagtagtgaccttgagtacctctggattactagggaaggggaggtagggatgggaagttgggcggtacacctgattatagcaagcatgaagataatagttttaagtttgctgttttgaatctgggcactaacttcaatgcttgccaggaaaatcttatcttgtaaagcaaatcctagtgangtcacgaaggtgtctcctcctccaattgggggtcagcactat

SEQ ID NO: 1147 - DNA, 568 bp, homo sapiens
ataagtgaaatgagtgcgttcttcctgcccctataatgacaagcctgacagagaacacatcacacagaagaatgtgccaagaatcaagacctcttagaagaatgttagaaagttttctctccaaatggattctgtctaagtaggaaggccttggcaactagaaaggtctaagatcaaatttatgacttgaaaactctatggctttgggcaaattatctgaacttaattctggactcaatttcttatctacaaaatgggaattaaggcatcaacctcaaagggttgtttaaagaatgtgattatgtatttctgtaaagcacattgcaaagtatctgacacatagtaggtactctctgtaaatattagcttcacttctctcactcctccaactgaactgcagttatgtaaagaaaagcaagcatccagcagttttgaagaatgtttggtttccattaggaggcaagggaggtgtaagattgaactcttgatcttatatgaaataaggatgcatttcctgtacacatacacatgactcacccttgggggagctcatatgtatttagcatcc

SEQ ID NO: 1148 - DNA, 493 bp, homo sapiens
gttgtatcccctagaaacattttaacaaaaattgtgttgataggacaagtttctgtttatttctaactagggtctcttaactaaatgtacataacattagcccaagagttgatcttctggttttataaagtagccacttgaacttagctgagttgaattaaatctaatatttataataatttagtaatggttttgttcttagactataagagaaggaaccaggttaggaaggggtaatgaagtaacagcaggaaggtatccacattgaaaacagttgtgatagctagagctatggcctctattcttgtatcttctgcatctaagtgccctgtctgtatcgaagttttaggaggccctaaggaaacctgcttgggcattctgattccatgattacatttgtgctgccagaaaacatttcccattgcattttagtgatggagatttaaagaaagccaattactgtaactcccttaaataaaaacatatttaaaaa

SEQ ID NO: 1149 - DNA, 158 bp, homo sapiens
tttggcactggattttatcctggagttttaaaatattcttcatcctgttctttttctattaaggttaatgttgaagaaggaaaatgcggaagtcgtcatttgacaagttttataaatgagtatttgaagctcaggaataagtgaagctgaaatttgaa

SEQ ID NO: 1150 - DNA, 482 bp, homo sapiens
ggcgggggctgagcagctccttgggcagcatgaagagctggggcaagaaatcagggagtgccgccttcaagcccaggacctgcggcaggaaggacagcagctggtggacaacagccacttcatgtctgcggaggtgacagagtgcctgcaggagctggaagggcggctgcaggagctggaggaggcttgggccctgcgctggcaacgctgtgccgagagctggggcctgcagaagcttcggcagaggctggagcaggctgaggcctggctggcctgctgggagggactcctgctgaagcccgactatgggcactcagtgtcagatgtggagttgctgctgcacagacaccaggacttagaaaactgctggcagcccaggaagagaagtttgcccaaatgcaaaagacagagatggaacaggagctcctgctgcagccacaggaactgaagcccgggagaacttgcaagcttcgctgacatcc

SEQ ID NO: 1151 - DNA, 333 bp, homo sapiens
  misc_feature (282)..(312): n=unknown
tcattctaggctcttggctgtacatggcaagggctggtacagagctcgctcatcagtgttcttcctccgaagagcacattctctgcacacgtctgcgtctacctgtgctcagagtcaccccttccaagcaaggaggaggccacatgggcctggggtagccctggccttgcccacctgctctgccgtaacacgtctcctcttcacccagacaggaatgcagggggaggccaggcaatggctgtttcctgccacatggtaggacccatctaaccagaaggaacnntccnatncagaagcnnggcccggggaacnggggtgaagcagccacgggaa

SEQ ID NO: 1152 - DNA, 439 bp, homo sapiens
ctggatttctacgtggattccatttgttcagtcaaaatggaagtttccaaatgtgctcgttatggatcctttcccatttttattagtgctctcctttttggaaatttttggacacatccaataacagaccagcttcgggctatgaacaaagcagcacaccaggagagcactgaacacgtcctgtctggaggagtggtagtgagtgctatattcttcattttgtctgccaatatcttatcatctccctctaagagaggacaaaaaggtacccttattggatattctcctgaaggaacacctctttataacttcatgggtgatgcttttcagcatagctctcaatcgatccctaggtttattaaggaatcactaaaacaaattcttgaggagagtgactctaggcagatcttttacttcttgtgcttgaatctggcttttt

SEQ ID NO: 1153 - DNA, 455 bp, homo sapiens
ctatgcaaaaaatggactaaaaatttttcatttgggtctttgtaataaacatgtaaatacatatttacaatggagatgcttcctgatagaaagtaaacagaagtaattttggtcttcactagaatccatcatatctattttcgaagatgatgtaatacatcatgtttactcaaaatttgattccttttatacacataatttaaataattactccacttttaccattaatgtttcattctgtatttaaatttccttcaagaaagattccttgatccagtagtagggaactctgtttctgtacagttaatgtgtaatttttatccttctggcaatattacaaatactgagtcatttaatcttcattgtttattctccaggggtaattcttgagtatctcacatgatgtaagtaccatctttgcagtattcatggattccattgtttgtcaagcagac

SEQ ID NO: 1154 - DNA, 401 bp, homo sapiens
gaactttggaataagtttctgtgtagatacccaaagtttaataattatgagagcacctgatttgatagacagaaaatacagttctttagtcaaaacacaagatctgaattttgttcaggtgctagaccatactaaatgtatatatttttaattatagtgatttgtttcatgtttttagattggctaattctgtaattttttccccaaaaacatgtgaagaaaggaaaagtaaattaaattccttagaactgttttaggttaagattctctgtgtctgcccatattctgcagtccttaacttgttttcaactctttacctcactcatgaacttgtttttacccatttgctgccaaacataggtgtgttcccttcaggagaatcagcatatacagggtatgat

SEQ ID NO: 1155 - DNA, 209 bp, homo sapiens
  misc_feature (21)..(202): n=unknown
gggtaacaatgattcctggtnataattttacctattcttgtnaatacagattttaaaattaattttgagatttatctattgntaggactaanagttttnaaagaccacaacgtaacattaanattactgatctttcnagttgannnanagcagtnctatatgaagtattatagtctgctgcagaaagtnatgcaanncnatnagtgaag

SEQ ID NO: 1156 - DNA, 550 bp, homo sapiens
cgccgctctttctcctggaatcagatgaaatggagaacttgctgacctacaagcggagagccatagagcacgtgctgcaggtagaggcctcccaggagccctcgcacgtgttcagcctgaagcagctgctgcagaggttactgaagagcaatagccacttgagtgaggagtgcggggagcttctcctgcaaagaggaaccacgaaggtggccacaggtctggttctgaacagagaccagaggctcgcctgggcagagaacagcattgacttcatcagcagggagctgtgtgcgcattccatcaggaagctgcaggcccatgtcctgttgatcaaagcagtccacggatattttgattcaagacagaattactctgagaaggagtccctgtcgttcatgatagacacgatgaaatccaccctcaaagagcagttccagtttgtggaagtcccaggcaatcactgtgtccacatgagcgaaccccagcacgtggccagtatcatcagctccttcttacagtgcacacacatgcttcccagcccagctgttag

SEQ ID NO: 1157 - DNA, 384 bp, homo sapiens
cagggaaaggctaggtgggcccagcctgcccttccttcctccagctggctggatatttattattagccaggagaaagcagccctggaacccagactctgtctccctcttgaggtcacagatgttgaagttggaatctcgctccttcccctgactaccatcctaggctgggcctcaagactagtgaggcctgtccccaccatccctggccttgttgtggggctcaggaactcagagtcccagtgttgagtctgggagcactaggtcttcatagttccaggcccagagctacagctgggctgggagcatgtgtgtgcactgtaagaaggagctgatgatactgggccacgtgctgggggttcgctcatgttggacacagtgaattg

SEQ ID NO: 1158 - DNA, 128 bp, homo sapiens
  misc_feature (117)..(117): n=unknown
ggaatggatgctcacccagtaagtataatgcagatattccaaaatctaaaaaaatttgaaatcccgaacacttttggtcccaagcatttcagatacaggatactcaaaacgtagtgnaatacagaaag

SEQ ID NO: 1159 - DNA, 517 bp, homo sapiens
attgtttggttaatgctgtagagtgagttgtgatgcatgtttgtgtcaatagtatttttggcttgcattttttaaattgttagattatatatacatcgtagttcagatggttcattcatactgctctcatagttagtattcatcgtctctcaaagttttcttacacaaatattttgttatcacagagttacttttccactggaatataaaaatggggtatagatgagcaatggtgcttttgttgttttggtttctgttctcttacctcacctaaatagatattgaagaatttgagaaccattagctaagtctaaattcttgattattgtatttaggctttatattgaggctttagctgctagttctttcagcatcatctcccaatctttctgttaacatcaaagtctagtctaacgtacagaatttactgtcccctgaaaattacacttttatggttttcatgcttgctgttctcttttcctagaatgtttccttttccttcttagcctggtaaaag

SEQ ID NO: 1160 - DNA, 551 bp, homo sapiens
tgatatacttaattaccagggtaatattcctaacaccatcacttttacttgacaattctcctgctctaaaagttatgaacctgacattcttggtcttacacaatctggacccagtctactcttctataaccatcttccacttaatttacaaatctttattaaggcacaggtactcctacttatcccctattgcctctctcatgctgaatcaatcatgccaaaagctaagaaaacatgagcatgcttgggactaaagaaacagaactgaggatttcctacacatcctaactgcaaggacagtccatcaaaagccagagataagtatttttatttgctctttatttcttaaaataatttccccaattttgttaacccctacctcaaatgactttagaggtattttaaaggatatgtaatatagttactaagcatttccactgattgtagctgaaggattttctaatgtctattacatgaaacttctccttaaactctcttttaacggaactgtcattttcctttccagaacgggcttgtctttgctttctcct

SEQ ID NO: 1161 - DNA, 374 bp, homo sapiens
agaccttccaggaggtagaccccttcctctgtagatcacaaagtaaaaaaggtacagggtgttagggtatttgtgaattcctggaatgagagaaagcagaaatataaaccagttgggtcaattgatttaggcaaaacctaggtctgtgtaatggtagtaagtgatagcatctgttgttgctttgacaattattctatttttctctgttttattcataattttgaggaggatttaccattttccctaatctcaggctattgaattagtaaatagcataaaatcaaacttgaacaagcttaattttgtaaaaatattcaacaatataaaccctcttttataaatttctctttgcagagagttaatggaagagtagt

SEQ ID NO: 1162 - DNA, 323 bp, homo sapiens
  misc_feature (183)..(319): n=unknown
aacattaattcttcattactactgatgggagcacttgctattgtctgtgataataccaactcttggagttggcagtgatacagcctaaatattggtatggcaatatctggatagagggattaattaacattactcaaaagctatgtcttcccttttcagttactatatatttaataagcgacnttgtcacctcatatacctattaactccggaataccaggctgccgcaagactcatgntgacaactacatctacnggaanangatctgcaagggcattgttggnggcacgtattgttcgaagaattcctntccctgcncttt

SEQ ID NO: 1163 - DNA, 504 bp, homo sapiens
gggcattcttggagggatcctgtgaagtattgttaggaggtgaacttcactacatgttaagttacactgaaagtgttcatgtgcttttaatgtagtctaaaagccaaagtatagtgactcagaatcctcaatccacaaaactcaagattgggagctctttgtgatcaagccaaagaattctcatgtactctaccttcaagaagcatttcaaggctaatacctacttgtacgtacatgtaaaacaaatcccgccgcaactgttttctgttctgttgtttgtggttttctcatatgtatacttggtggaattgtaagtggatttgcaggccagggagaaaatgtccaagtaacaggtgaagtttatttgcctgacgtttactcctttctagatgaaaaccaagcacagattttaaaacttctaagattattctcctctatccacagcattcacaaaaattaatataatttttaatgtagtgacagcgatttatgttttgtttgata

SEQ ID NO: 1164 - DNA, 101 bp, homo sapiens
  misc_feature (12)..(101): n=unknown
catttcattccnaatttccacagatcatancagctcagnnntttanctgaatcctacgcagttangattcangattcatacacagangacctaaatanntn

SEQ ID NO: 1165 - DNA, 492 bp, homo sapiens
gcatgctgaagactcccgcattggtaactccagtctgactgtgggacataaatgttattgaactttagacttgtatatcgaactgattactcaagagctgcatttgcatgtgtaatggacatcccaaacctaacataccccccaaatgaattcctgatatctacctaacctgttcttgcaacagtcttcttcccagggatgagtgaagatcccatcatctttccagttgctcaagccaaaaaccttgatgtcactgttgtctcttctttttttcatccaaaattcacctgtgatttatccacaaattctgtcggcttcatcgttaaaatatattcattatcaagccactttcaacattccactgctataaccaccaagccaccttcatccaccttctggattattatattggcttccagacgggttgccctacagtctattcacggccccagagtaatcctcttaaacctaagttagatcatggccattcat

SEQ ID NO: 1166 - DNA, 293 bp, homo sapiens
  misc_feature (33)..(289): n=unknown
gaaaaagaaatgcatatagtgaggtatgaaggnnagggtnnggagttccatantccttcccntttgcacncnccgannccaggtggnnnnnnnnnnnnnnnnnnnnnnnnnnnnnnnnnnnnnnnnnnnnnnnnnnnnnnnnnnnnnnnnnnnntatggagantttgtaacacaggcatgattnattaatccatcagccattngtgatccacttcagcttcagttgccctcctccccagatgtnganngggtggancngaaattgcnatncttntaatcntgntntggncttt

SEQ ID NO: 1167 - DNA, 264 bp, homo sapiens
  misc_feature (66)..(252): n=unknown
ctgccgtcagagtctgcctttgtgtctttatctgctttgccttcctagtccccgtcctgcttcgtngcccggcatctggcagggctgggagacgcctctccagattcctctggagcatnccctctggagnctcctctctgncctgttntgccgggngttntccagncctcgtggctgtggtccnggacaggtctccccacactggtggggtccncttgtttcgggggttggatcctctanaatccctggngncgtcttccttct

SEQ ID NO: 1168 - DNA, 448 bp, homo sapiens
cggagaagtgctctcttacttggaattggctcagtttcacaatgcccaccagttggccgcctggtgtttgcaccacatctgcaccaactacaacagtgtatgctccaagttccgtaaggaaatcaaatcaaaatctgcagacaaccaggaatacttcgagcggcaccgctggccccctgtgtggtacctgaaggaagaagatcactaccagcgtgtgaaaagggaacgagagaaggaagatattgcactaaataagcatcgctcaagacgaaagtggtgcttctggaattcatctccagcagtggcctgaagaggaagagaaaaaaaacaaaaaacagaaaccaatcggtaatctgatccaccacttttcaaagcactactataaaattcgtcttgttagagatacgacatagttcaggtttcgggcactgatcttcctccacttttg

SEQ ID NO: 1169 - DNA, 450 bp, homo sapiens
  misc_feature (21)..(76): n=unknown
  misc_feature (236)..(399): n=unknown
gcagggtctagggtgttgttnggagtggcagttggtccgaatttctcccgaagcccgcggaggagcgggtaagaancccgcgaatccggcccccaactcgggaacgggatgggaggcggccctggccgcaagccccgcgctgctagcgggtccaccgcgtcgtagccgacagccgcccttcttcctcgcagcgcgccgcgattcaccagcctggtcccttctgcggagagcgatgncgcttcccgacaccatgttctgcgctcagcagatccacattcccccgngagctgccggacatcctgaagcaattcaccaaggctgccatccgcaancagccggccgacgtgctgcggtggtccgcgggctatttttcagctctgtcgagaggagatccacttnctgtaaaagacagaatggaaatgcccacgggaacccagaaaacagacacag

SEQ ID NO: 1170 - DNA, 259 bp, homo sapiens
  misc_feature (191)..(254): n=unknown
attttaaagagcactattttgacattaaaatgtattcttctctgtattaatggcctacatcttcagagttttcaatgctttctaaaagtttcctctttggaaagaagaaatctgaaagacctatcatgccgttcttcctggcgtctatattttcctttagagaggcaaggtaggattccgtctccaagggngacacatctgagtctaatctgggcaagtagcgggaaacgtaggaaaacgtcttgaaggggatncgaac

SEQ ID NO: 1171 - DNA, 424 bp, homo sapiens
ggggctaaagatttccaaagagtgaaagtctgtggacaaaattctctatacatgacttcatctgtcactttcctattgtgccaaattttaggctccctctcttatcttggttaataatattgctcactctctttttctcctgcagcataatcaccttaggacagagctgtgactaatcaatgcttatatgtccttaatgcctggccaattattgagggactaagcatttatttaattactgaattaaagtattccttaatcctgcttctatttttttgtgtttggactacactagcaacatttgcttttttgtagtggatcatagaaacccaatgcctcctctgcatctcaccagccaaactcagtcatctggaacttaggttcctggttaaagaaagactaaaatatatttcccctgtctatt

SEQ ID NO: 1172 - DNA, 419 bp, homo sapiens
  misc_feature (61)..(61): n=unknown
  misc_feature (404)..(404): n=unknown
cttttctgttactgttatattatccagtagagaatgttaggatatgtgtgctatataaaanaaaaaaaagacttgttaagttttaaaataacaaaaatggctagttgaatagtattttatgtgtaattcttccatttattctgtttaattatacaactaagatgaaatattgaaaaaccctttgtgaaagtaacttttcaagtaaatgcacaactttagaatttctacaaataagttcttttaaacagtctttttattgtggattgtgaaatcaaaatctggagaaatgcttataaaatatactactagcttttaagttttaagaaagaagaacgtaagttgtacaaagatatttgtactttgacaaactgaatttaaataaactttatttcctctcaaaaaanaaaaaaaaagggcgg

SEQ ID NO: 1173 - DNA, 355 bp, homo sapiens
acaaatatctttgtacaacttacgttcttctttcttaaaacttaaaagctagtagtatattttataagcatttctccagattttgatttcacaatccacaataaaaagactgtttaaaagaacttatttgtagaaattctaaagttgtgcatttacttgaaaagttactttcacaaagggtttttcaatatttcatcttagttgtataattaaacagaataaatggaagaattacacataaaatactattcaactagccatttttgttattttaaaacttaacaagtctttttttttttttatatagcacacatatcctaacattctctactggataatataacagtaacagaaa

SEQ ID NO: 1174 - DNA, 432 bp, homo sapiens
ctcttgacctacaaaaatttgcggtctaacagaagtcaccatgacactgctacctagctcttgagtctgtgttggcctctcatgacaatgggtttttgagaagacattgctgtattttgtttcctattcgcttccttaggattaaataagtggggtggtatccagaatctcatgtcccatcgatgtcatttgctgggtaaccaacagcaaagatcagatatttacctctgacatgcaatgttcaaatgaaatagtaaaatgtctctatgtacatgttttatgcctctttataatatcaattgaattctatcctttctgaagtcactacaccatttctcccagtataaaattgtctatgaaatctcagagttggttctgacactactaattttgagttgagtgaccttagacaaaccacctactttttaagct

SEQ ID NO: 1175 - DNA, 409 bp, homo sapiens
  misc_feature (306)..(383): n=unknown
gttattttaaaatgtacaatgtactccatggagcactcagtaggtgtgagtcaccctatttaccacattatatgcacttttattttaattttcagaaaagcttgatgagttaactattattaacatgcctaacttttatatgagaaaagtgaagcttaaaaagtaggtggtttgtctaaggtcactcaactcaaaattagtagtgtcagaaccaactctgagatttcatagacaattttatactgggagaaatggtgtagtgacttcagaaaggatagaattcaattgatattataaagaggcatnaaacatgtacatagagncattttactatttcatttgaacattgcatgtcagaggtaaatatctgatctttgctgttnggtacccagcaaatgaccatcgatgg

SEQ ID NO: 1176 - DNA, 226 bp, homo sapiens
  misc_feature (125)..(125): n=unknown
agaaaattggttacttaggtcatgtagggagttgcaggtagagcagaactcagatgcagaaatatgcttctcatttttccaattctacttcagcacaaatgacttgtggatttgagagtgtaacngagaattgtacaattgaaattgtacaattccaaaattgactaagggtttctactggtaagccagatagcaaacttcagaaagccaagtcagtagcagatat

SEQ ID NO: 1177 - DNA, 294 bp, homo sapiens
cctggccagttaaaaaacttttcgacggtggaatacagtcgaaatctgtagtaacgtttcatggctttccctgctgatgtgaacatccgggtctgttcagttaacctcttactccaggtttgttttccactttggatgccggacattgagaatgtcacgcatgctgtgctcttccacattctgcaggctcctcctcagctctcttctgggatgaggttgggttccatggatctgttcagtctggcgtttgtgcttatgctcccagcagtgcagggggcagcccagggcggcctc

SEQ ID NO: 1178 - DNA, 567 bp, homo sapiens
  misc_feature (408)..(530): n=unknown
tagttctttataacttctagatactaaaccactgcaggttttttgtgaggcaagtatctctcagttaatggcatgttttttattttcttctggagtttcttgatgaaaagacttttcatgaatatgaatgccttaatcttttgctttatgagtgctttcagtatcttacattaaaaaaatagtttctgccctcagcgtcaaaaagagatgctattgtttttttttaaagtgttaaagttacttctacttctaacaaaaacagtaataggggcctgattcgccctcacaccttaagtaactaagggaaagaacaaaacacacaccctcacacatcacagggtggtttccacaacactgggcccggccaatgactgacagccgtgccagccagtgacagctgtgcctganggcgggaaggagccgtgagagggcgccctgggctgccccctgcactgctgggagcataagcacaaacgccagactgaacagatccatggaacccaacctcatnccagaagagagctgaggangagctgcagaatgtggaagagcacagcatgcgtgaca

SEQ ID NO: 1179 - DNA, 383 bp, homo sapiens
  misc_feature (378)..(378): n=unknown
caaatattctgcatgtcaaaaagaagctgggtgtacactgaaaaatcattgaaactactggatttcctttgaaacaaataatgaagatggcatcaaaagaataagagtattctattgagcattgaaacgcctttctggtaggcattgagggagatctagagagatgaaagatacatggaaatcatattatattgaaatataatatgatttgcattattgtttgaggctttggctaaataacgttactgattgtaagcacctgaaggcaagggttttatccaccacatctttgtctgccatagcatttagtcctctgcatacaatgggctgtccataattactgtagattggactgaaaataaaaaagtccacaagatnaatgc

SEQ ID NO: 1180 - DNA, 580 bp, homo sapiens
  misc_feature (42)..(42): n=unknown
gttgaagagctcaaggtaattataggtcagggtctgcaagtnggaagggctgaaactagcatcacagctacttctttctattgaaaattttttacagtcctttgaagcggcgtatgaggagagcatccaggaactataatactgggattccatagcctccatttattaatccaagttcaatgagacccaatactaatatttagagaatgttatgagaagctataaaaacaggggagctggaataaatgatgtttaaagttccatccaactctttggattgtggaggttgctgatgacaattcttcagcctccagaaagcttgaagtaatgattgactctgcactttaaacttgaaagattcgtgtgaggatccagcaatgttttgtgaagcattgtaagaagtggagagatagctgggctcacttcagaagacccaaattttgattcaagactgctttgttctctcaccagaggcaaacatatcaccaggttgccttgggaggagactgctaacaaccattgagcagacataacctggagatttgttttgcaatgtgttgtataacaatgttgatttaat

SEQ ID NO: 1181 - DNA, 206 bp, homo sapiens
tactctgcgcctttccgaaaggacctgaggtagctaaataacacttaaaaaaataaaacagaagagtacagtaaatgtcccaaggcaaataggtgaatattaaatattcagtacttctttcagaagagaaggctgatagacttgaagagatgagcgtttctgggaaagttagggtttgagtggacctaaggatgaagatttggctg

SEQ ID NO: 1182 - DNA, 219 bp, homo sapiens
  misc_feature (173)..(218): n=unknown
cccagaaacgctcatctcttcaagtctatcagccttctcttctgaaagaagtactgaatatttaatattcacctatttgccttgggacatttactgtactcttctgttttatttttttaagtgttatttagctacctcaggtcctttcggaaaggcgcagagtattgaaatantattnattattatgtttgagacaaggtctcgctccgtcgcccagng

SEQ ID NO: 1183 - DNA, 286 bp, homo sapiens
  misc_feature (146)..(163): n=unknown
catcagttctactgtaatatcagtgtcagtttttaaaatgtgaaataaatgagtgctctgtagcagtgaaacaggagtttactcacaaggtctgaggaaggtggattgcagatgtaaagtggctgtgggtcctttccttttaatgnangggagatttatggtncatccgaagtcatcattctccacaactcagttttgtgttttttgtttgtgtttttcatttattatataaaaaccatggcaaagcactaaagaaaacaaacataaagccacactgtaactcctg

SEQ ID NO: 1184 - DNA, 596 bp, homo sapiens
  misc_feature (549)..(592): n=unknown
gacagaacatatttaagtcctacttttagcatgtgaaggagctagattctacattttcttaaatactctgatgagttaaatggaactaacactcaaatgccaccaaatccccccaccactgatagttaacaatgacagcatctccgactgcttcttgcatctttgctatctgcctgactccattctgagtgctttgcatcaattctcctgtaattctctttaatatgagataagtatccccagatttacagatgaataaaactgagactcagctcacacagcaggcccaagattgtccagttaaataaggagcacaagcaggatggaagccaggccagttcaactcaaagggcctcacttaacaccaaggcctactttgaagggtgcaagacttcaggcttgtatcctcaggtgggctgtaaaataagaggcctggactacactagctctaaatttgttacccagtatgctacagttaatttaccaagatacatagtgcaaaaacaaggaaaaagattaacgtcactttttactatgattttgtataanataattggaatttaaaataggggcccaaacattatctttatgnaaca

SEQ ID NO: 1185 - DNA, 354 bp, homo sapiens
  misc_feature (260)..(269): n=unknown
ggcgaccctgctgtcacaaggacaggggaggaagaagccaccaggcggggccgaacccagccttcctctggacaactgcatccctttgttcaaaacacacttccagagatcggattcggccccaggcaccgtgccaggtactggaggtccagaggaggttccaaccccgttgccttatcccatcatagcagtcacaactgggctaagtctttgaatcctgccctttcaaagactggattttgaacaagtccttctaaatnannggnttnccttctctctgacactgggaagagggagaggagaaatctgtctttcaggccagtgtctctgaaggatgggatgctttctactggc

SEQ ID NO: 1186 - DNA, 338 bp, homo sapiens
ttgtttggtttgatttggttatgggttagcaatctgaaagcagttaccattactaattctaaaaatggattcaaaataggaacacttccaaattagaagcatttttttaaaaggagtctgaattcaaaagtctgactttatctttatcaaatgcttttggcaatgttgaagaaatcttctgggagaaatgtaataaacatttcttggagggacagcatagagtgcaaacatctcaaacgtgattcacttgcattttctgaacaatgcttttgcctactctgagctgttggttccagtatttggagtccccatgacagaaatccaaaaccacttctaga

SEQ ID NO: 1187 - DNA, 408 bp, homo sapiens
  misc_feature (83)..(111): n=unknown
ccccttttactcaacttttccttttaacgtggctatggccacccctggcttaatgctaaaactcataggacaaaatgtacttnnnnnnnnnnnnnnnnnnnnnnnnnnnnngcagttgccaaccgaggcattttctgactcgtcagaaatgtgtgtgcgtgccagctgccctgtgctcagccaccttaggagacccattgctctgtcgccatagtcttcatgtcccgtgttccagatacccctctcattcctatgatctggaaacttccacgtcatgagggtgggaggggtgaggaaggtaccagaatgctcctagccaatcagggcttctagcttgccacacaaggtttctagtttcatttgacatttgtggacattttaacaagatcctgttttgagcccaccaag

SEQ ID NO: 1188 - DNA, 418 bp, homo sapiens
  misc_feature (291)..(411): n=unknown
gtccatgtaacaaaggtatctgttgcagtgttcattttgatttacattattgcacacacactgggctagatttcttttttaaagactctggtcttccaccccaaattctgggcctttgctcatttggggtattgatactgaacatatacagccaattaatgtattcaaatggagccctaagatccactttgcagtactagatgtgtagatttacctatctttagcctaatacctttcttcatttatcatgtattcttagtcgcaggagctgctcagctcctgatttctgtnattactgcccaggnatcctcccttcataagacatgcctatgaaatggacacaaaaatttggaacacaacaaatctaagacttatcataatagttttttgtttnattgttaagatttngnnatgtcct

SEQ ID NO: 1189 - DNA, 525 bp, homo sapiens
gtgaatctcaaataactaacactaacaaaggaacatactttggggatgcagatctcaagccttacaggtaactgtaatggttgtaacattcacatcttaaaataaaatctcccaggaaaataatctggaattaattccaaccaattctaatgagaattgagagaacttatctctatctcatgatttcatattcttgatatgtgagctcagtaaaattactttaaaaatatgcaaattccatttccataagtcttttatactatcagccttgagacttgattcataaagaaatatttttcttttttttggacagccttgcatcatgatccattcatagggaagtgcagagtagattatttccatgaatagtatgcaaaaagaaaatttatgaaatccttcaagttattttcagtctggcatgggtctatttgttgttaacaatgttgccagtcataccaccactaaaactatggggaactgggggtcacaaaagaaataacacagtaattgctattccaatcagag

SEQ ID NO: 1190 - DNA, 400 bp, homo sapiens
agaagcagtgatggaatttaatttggacacaggctcaggattaagctgggagggaactgggtggagaagtgaaagttgcacagacactgttgttttactccaccgagctttactcatcacaggctgctccagtggggctgccagtcactgccccctgctgcttgaagagagaagtaggttcatgactcaggccttgccattcacagcatctcattcctctggccacagtgattggcccagggatgggcatgtgactcaagtgaggccaatcatcatccttctctggaattttatagtcactatgagaaaaaagctcttttccctgggatcccagcaaggtcctcactgggctggaatgatgaaagcttgagctagctgtctgtggccatgtttccacatc

SEQ ID NO: 1191 - DNA, 242 bp, homo sapiens
ggaaaagaagatctgccattaacaggtcacttttggattaatttgtacatgactttaagtgatgatcctcaactcatttaagattaaagagccaagcatattgcagtggacatacagaaaagtcatgataatcattgaggatttactaagactctccatgtctcagcttcaagccagtggcaagtaaaaaagagaagagaaaataatttaaaaaaagaatctccatgccagcttccactggc

SEQ ID NO: 1192 - DNA, 76 bp, homo sapiens
actctaggtattccatataattagaatcatgtagtattagcccttttgtatatggcttgtttcatttagcacaatg

SEQ ID NO: 1193 - DNA, 359 bp, homo sapiens
tcacgttacctacctactcttccagggaatggacatgcagattgccttcataccctcccaccacaggaaatgctgaaattaataatctcatacatatccctttatgggccagtttgagaatttcttaggtcacagaatttctgggtcataggatatgagtttacttgactaagtggtgccagattctctccggattggttgtaggagtccagactcccaccagtatggaatgagagtttccatatcccacatctgtatgaacacagcactgtgtagctgtctcatagttatcagtctaaaaggtataaagtagtatttctttgtagtattaatgtgcatttctcattgccagtgatttt

SEQ ID NO: 1194 - DNA, 264 bp, homo sapiens
  misc_feature (180)..(238): n=unknown
ataagagggtatcagcagagtctaaaactatcagagagttaatatctagaaaacataaacatttgcaaattaacaagaaaaagactaatcccaattacattttaacaaaaggtacaaaaggcaatttacaaacaagctgaaaaagctaacaagcataaaagctatttcaaaatcactggnaatgaggaatgcccttaatactncaaagnaatactactttataccttttngactggtnactatgagacagctacacagtgctgt

SEQ ID NO: 1195 - DNA, 196 bp, homo sapiens
tgggcatccccaccgagggttctttatctccttggctcgccagcttcgctctgagctcagcttgctactgctcctcttagacaagagaagtgggaggtattccgaggcggaaccccgagttacgccgcccgcggccgagcactaaagatgaggttccagctgggaggcggctgcgtacgaaagtcctccctccctc

SEQ ID NO: 1196 - DNA, 379 bp, homo sapiens
atgaagggttacaaaaagagatgagcctggcatttctaattcgggggccttgggacctctcccctccaagtgcaagttgtagcaacctgccgggtccacgcatgggcgggtcatactccacgggttccggtttccactccctgtgaaccaaaagccagagaggcccacgcacgactccggaagtgagggagggaggactttcgtacgcagccgcctcccagctggaacctcatctttagtgctcggccgcgggcggcgtaactcggggttccgcctcggaatacctcccacttctcttgtctaagaggagcagtagcaagctgagctcagagcgaactgggcgagccaaggagataaagaaccctcggtggggatgccc

SEQ ID NO: 1197 - DNA, 436 bp, homo sapiens
gcctcggtgttcccacctaggggcgggcagccaggggcacttccgctggcccaagtgatctgcatgtggcagggctgcgcagtggagcggccagtgggcaggatgacgagccagacccctctgccccagtccccccggcccaggcggccaacgatgtctactgttgtggagctgaacgtcgggggtgagttccacaccaccaccctgggtaccctgaggaagtttccgggctcaaagctggcagagatgttctctagcttagccaaggcctccacggacgcggagggccgcttcttcatcgaccgccccagcacctatttcagacccatcctggactacctgcgcactgggcaagtgcccacacagcacatccctgaagtgtaccgtgaggctcagttctacgaaatcaagcctttggtcaagctgctggaggaca

SEQ ID NO: 1198 - DNA, 234 bp, homo sapiens
ggggagtgagggaagcagcgtaggacagaggaaaaaaactgagtaagaatgtgctctcagaagaagactgacttcagcttgattccatgaggagctctgggaaaggaagttccttgatgtaagaggtcagtcttttgtacctccatacaagaggtagcaattcttttctagagatggtctcaaaattagaatacatcaaaatcacttggagggtttggtaaatcagaatgctgt

SEQ ID NO: 1199 - DNA, 422 bp, homo sapiens
  misc_feature (419)..(419): n=unknown
tgcccgggctgcgggcatcgcgggccgcgagcgcccctgcggccgtgcccggagaccaggaaaacgggcgccacggcccagggcgcctccgagttccccgccaggactcggagggccaggagggcgcgacctgggtggatatttttgttggacggcgcaactcttggggtggcccgggagcggcggaaaccgagcgagagaaccaggaggcgctgcgcagaaggaggcccgggggctccgaggcgttgaggggctcgatctgcgttctggggtccctgagtgccagaggtggtggtgttgcttatcttctggaaccccatgcagccagatcccaggcctagcggggctggggcctgctgccgattcctgcccctgcagtcacagtgccctgagggggcaagggacgcggtgatgtacgnctc

SEQ ID NO: 1200 - DNA, 478 bp, homo sapiens
  misc_feature (58)..(160): n=unknown
  misc_feature (279)..(453): n=unknown
cttggaaaattacagggttacttatcaacaaaataactgtccatccggtggggaagtnccatccggtggcttctatgtacaggcccatccctgggaaccacatttccagagggggcctccccctgaggcncccattggccccctcccaggtatccaagantaaatcacatggtgacagctgccggcatgggtgagtgggacccaggcctattacccggccagagggtttgggggcctctctcctggaagcctgctctttccacaccccctttcccagcnaggctgtcttgganactcccggggctccgctgaggggcacatgattcccgctttggncttcttttganatgtcattttaacactgaggcatcctggcctcccttcccggaagatgggttatttgcagtgctgtcttgtcttttagtcccggtttttntacaaaaacnatganantccccattggactgtattttttccc

SEQ ID NO: 1201 - DNA, 432 bp, homo sapiens
gagctgagcttgaacagaacagaccctcagcacggccctggactaatgcactcttatctgagggcagtccattctagaaggttgatgaatttccctaccactctcctggggaccttttctctctagtgggaacaaatgctacataatttagtcaagatcctattaagtcatctcacctgaggcatctggagagggagttgccttccattggtgggaaattgttggtgccagaatacattttgcccaaaactcttctcattggctggccacctagcagggctcctctaaacacgcaactcagcgaggggacccccttcacctctggcaagagagctgggtagatcagaaacttggtgacacctggctagcacagagcaggctcacttgtcttggtcccatacccagattcctgcagacattgcaaaccaaatg

SEQ ID NO: 1202 - DNA, 441 bp, homo sapiens
  misc_feature (300)..(300): n=unknown
tggaggaggaggtgcttgaacacagctgtgacccgctcacctactggaacctgaagaaggcgtcctggccggggctgtccgcgctggccgtcagatttttgggctgccccccaagcatcgtcccttcagaaaagctgttcaacacacccactgagaacggtagccttggccaatccaggctcatgatggaacattttgaaaaacttatctttttgaaagtgaatcttcccttaatatactttcagtattgaaactcacgacggcaccactaggccagaggcgtggctgccccagcgttanagcctgtaccaggtctatgacccgctctgcccacggctgtgtacgacatcagaccaggcatctcagggccgctctccagctcaccacagtgtctccacgtgccttaccccttctccttcaggccaagtttcgcggggtgtt

SEQ ID NO: 1203 - DNA, 208 bp, homo sapiens
  misc_feature (47)..(190): n=unknown
ccatttataaatacactaaaacatagtcaatgcaaatttagattaancntacgtagagtatttcaacaaaacaactttnctaanagntcgtangcaaatgagngattagnctcacncnggntatttaattggttaaaatnagaaaatgaanctntnnntctctnnanacatnactttnaaantcatctgncaactgacacttcactct

SEQ ID NO: 1204 - DNA, 305 bp, homo sapiens
  misc_feature (114)..(114): n=unknown
aaacttttaaaagtcaggatggaatcctgattccaagcttaggttctgaaccactggggtaggctgtgtagtactacattttctgtggaacgtggtatcggtaacatgggaganacaggctgtgcctcaggaagatgccacatgggagtgcacagcagtgctgtagtgcctcgtgtttatgtgtagtcccaggtgcctggctgtaaacaactgcagggcagtgaccatcacctctgcttttctgcatccccacacttcctaacacagtgtccccccaaagtgtgcatccaatggatggatgaata

SEQ ID NO: 1205 - DNA, 72 bp, homo sapiens
cacatctccatggtatctcttccttttcttacaagaacaccagtcacattgaattagggcttaatggcctca

SEQ ID NO: 1206 - DNA, 302 bp, homo sapiens
  misc_feature (24)..(24): n=unknown
gtttaaggaaaacaaatatttggnaaccaaagttctatacagagttttttaagaacaggaattttagaaagtatatcttaatttgcaaaactcatttcattaataagcttgcctagcatagtacaaacatgatttagttgccaaacatttgacattaatttttcaggaagacacccactgtattaatgatgatatctgagctacattagcatatccagtgctcagatagattagtggcaggtcagaattcagatccaggccaaagaataacacgagggtgtcactgtagtcttacttctaga

SEQ ID NO: 1207 - DNA, 422 bp, homo sapiens
acaattttatatttttccaagtgtataaaaactctcagagtagagatttatgtctgttgtaccagcagacagattatttataaattgggaaagggaaagtttactttttgccaaactgaggcagagggggtggcaccttaatatcttggcctctctccaacttcttttcacaatccaccaggtaattgactccatcgatgactatctgaacaagctcaacctttgacagtgaagaagatgaatgattaatttgaatagaagcatctgcagggcattgattaacaggaacagcactgtgataaatgagaacttgccacttagatggacttcacaacaattccttccttctcagaaatggaaggcagagatataagggttctctcaatctttccatagttaagatggggatactactttgtatg

SEQ ID NO: 1208 - DNA, 389 bp, homo sapiens
  misc_feature (286)..(370): n=unknown
tgcttactggtgaggttgaggaatatcacactcgtctttccctttaccactgtggttttgacttaagaaagcaaaactcactaagtttacttctcgaattgaagcaagtgaggcctgacatggttgtcatcactagtggcaaatgaccttccaagtaagcagatgggaactgaattgtgttttcaggttttgtttttagtaggtgatattcattcgtatccagctctttattacatagctctgaagttaaaatgatttacataggccgagctgtggacaaacaaannaanagaagcagcagcttgtagtatgcttaagctttggggantttnttttaaggggatctaaaaaaatgtttttagaacatgtnaaatgtttaatggtgaaag

SEQ ID NO: 1209 - DNA, 401 bp, homo sapiens
  misc_feature (5)..(395): n=unknown
tgcanccaaaggcaaaaaatagccattcctcgtactgaaagaaacaagttactcagataggcaagaagaacagatatttaataaggnaatattccttcctgttcccantttcaaggaggcctcntaagacatgaagaggaccnaaataacnattgnagtataacttcacatggtggggtggggggtgtngagttcaaatgtggttgatcnaaatantggtgttactttccnttagacttgattccaacatgtnnaaaaatnaggnactttantgggagtgantttaacttcagtantnaaagggcaatgccattaagagttaggggagtgtntctcaaacttcntcctcagangtgctttagaaattgantaccnttgggntgaatttaattttnggaata

SEQ ID NO: 1210 - DNA, 445 bp, homo sapiens
  misc_feature (25)..(47): n=unknown
accccgcggggcagccatgcctggncgtctgctgcggggcctgtggnagcgatggcgccgttacaagtaccgcttcgttccctggatcgcactgaacctaagccacaacccgaggtacagtatatcagaagtatgagccgatctttttccagtccattggaaatccgtttatttttagatgcctggatggggtactcattgatgggaatgacaaagggatatcaaaagttgtgtacagatcttgcaatgggagggatcgactcggccctttagaaatgagtgatagtacatggctaacgtcagaaattcataaccctctggctgtgggacagtatgtcaacaattgttccaatgacagagcagctaatgtctgttatcaggaatttgatgtgcctgcagttttccctatagaactgaagcagtatcttccaaacattgcctacag

SEQ ID NO: 1211 - DNA, 335 bp, homo sapiens
  misc_feature (30)..(331): n=unknown
aaaataaagtttttacagaagtttgtacanatcagcagnactacaagaactgctgatgcctggctacaattttataaaccaccacagagcttacaaaataaacaaaagaaaaattgnaattataagttcaaagagtaggttttaatntaataagctattgtgtatntaggtgaaaaccaatnaaacttggnattgcattanaaatttggnaattgtnatgnagcaagtagcttttatcatgaaattggnacataaatataatatcaananaaacataagnanttcctattccaantaagtctcaaaatatttgtttngcaggtagaactcngaga

SEQ ID NO: 1212 - DNA, 324 bp, homo sapiens
cttagaaccttaaggagacaagcgaaccaagccaataagctttccatgatgctgcttagagttaaacagagcccaggtactaagttatgtcatggagacagtgaactaacctctggactgcttgctacatgagacaattgattttcttattttctatgtagggtggtacatttcctcattttgagatatttcttcaacatatagcttttcattagtggggattttgtcaattataaccaaaaacaatgtgacggatacccaagatgtttcatgttgtagcttgggtgaattacacatttctgaagccattacacttcctagttt

SEQ ID NO: 1213 - DNA, 101 bp, homo sapiens
  misc_feature (58)..(58): n=unknown
agacctgaataatacttgcttctgatctgcatgtccaaatactttcatttttcaagangcaatgttataccaacgtcagaacaaaggaacactttatgctg

SEQ ID NO: 1214 - DNA, 336 bp, homo sapiens
  misc_feature (2)..(319): n=unknown
gngtcagcngcgganggaatgcnggcngcatcgcggcggtcgcngccttggggatgggcgganccaagccgctagtgctggtngccgccgctgctgccccagctggagcccgagccnccgcctctgcgtccgcgcgtcgctgcttcccagggcggcggtatgctggggaaaggagtagtcggcggtggcggcggcaccaaggcccccaagccctccttcgtncncgtacgtacgcntttttgaaattcacacaaacnaaaaggnagtaacagagaaggaagtaactcttcacttgttgccaggtgaacagctgctttgntgaagccagcacagtac

SEQ ID NO: 1215 - DNA, 444 bp, homo sapiens
  misc_feature (155)..(178): n=unknown
  misc_feature (408)..(411): n=unknown
ctgggggaaaaaagacaacagagctattttacaactgtgctattccccccaaacttcaccaaatgcagttcatacattcaggatttctgtcctttgtgtttatgtgtgttagggggtagagtaactgagaagctgggaaaaaaagacaacggaancacaaccacactgttgcccacnnactctgccaaatgcagcccatacatacatcattatccaatgcagattcatcatcacccaagaaggcaatcttgaagtctgtgcagacaagcctcccatagaccccatgctgacaggaatcttcctggacatacttcagtactgtgctggcttcacaaagcagctgttcacctggcaacaagtgaagagttacttccttctctgttacttccttttcgtttgtgtgaattnccnagggcgtacgtacgacacgaaggagggcttggg

SEQ ID NO: 1216 - DNA, 313 bp, homo sapiens
  misc_feature (210)..(210): n=unknown
gattacagaatgaaaaaataatagaacaacaacttcttgtggatcaactgagtgaagaactaacaaaacttaacctgtcagtgacttcttcagctaaagaaaattgtggagacgggccagatgccaggatccctgaaaagagaccatatactgtaccatttgatactcatttggggcattatatttatatcccatcaagacaagattccnggagggggaatcacttgcaaggtccacacaagtccgcctatgtactctctggatcgaatatttgctggatttcgaacacaaagtcagatgctgttggatcacg

SEQ ID NO: 1217 - DNA, 270 bp, homo sapiens
  misc_feature (38)..(105): n=unknown
  misc_feature (223)..(223): n=unknown
  misc_feature (13)..(13): n=unknown
gtattcgcagtcnatggctcattttctttatagtaggnatatggatcttcncctctgantttgaatatcatttggtgtggcctgtgggttattttcattctttancaccaaataaagcggcttattagctactcagttacttgctactcaaaggttaggtcttccctgttcctgcttggcagtgttaaagcttacagggttaacttatgatgattctcctggntcattttcatcagaggcatgatgactggaaagggatcacatgggtcg

SEQ ID NO: 1218 - DNA, 85 bp, homo sapiens
  misc_feature (28)..(84): n=unknown
caaatacaaattttctgttaagaacggnaangtgcanactagnagagtcaatactggtaaccagaacgcactantccnnncacnt

SEQ ID NO: 1219 - DNA, 346 bp, homo sapiens
aaaagagcttctttttcaagtcagataattacttttagaaattttcctccaacgggttcctccctggtctctggtcccttttctccacccctccttggggcctctgagttcctcaggaagtatttccagtatgggctgtgggttgctgcaaggcctggggttttcttggtaataggcactttgccacatgagcatttgacagtccagtctcgcagaggggccgttcatcaccttgctactagcccacacaggaagaagaggctggactcagcctgtaacagaaatctgtacagtttgttgtgtttatttcctgacttggcttagaattgtgatgatgattgtaaga

SEQ ID NO: 1220 - DNA, 368 bp, homo sapiens
cagtggtgtgatcacggctcactgcagcctcttgagtcaagaggcaagaagttacaaataaccacagattgccagttcttggttttactatcatgtattaagcactaggcaccgagggcacaacaaccaatgagacagagctttccccgtaaaggagaacacatccaggagagagacataagtaaaacagtaacatgtcaagctccaagtcactacagaataaatacattgagtcgttgggatccagacccttcctgtgagtcttagggttccaggagatgcctgggggacttctagagggaaaagaggatggggggcccatgctcagcttcatcctcagcagttcctccttcactcttttatatact

SEQ ID NO: 1221 - DNA, 407 bp, homo sapiens
  misc_feature (29)..(29): n=unknown
aaagagtttgggtgttattctaagtgtantgaaatagactgatagattcggagcaggacaatgatatactatatttcatctttctaaaaagatgcacattttttcacctttaatactggggcacttcctacagttgaagtgatttttaaaaagcagtgcaaaataggttaatttgtagagttttttttttctttcttagtggttcagaaaataattttgttctttttaatgagtggagtcttctatttgatttaattcagtaatttatattttttaagtacagtgtttctgttttccaggttgctttttggcaatggggttagaggagcaggagaaaactcaggatatcttctaggatattggttataatagctccagggccacacatattggtagctcaggctaga

SEQ ID NO: 1222 - DNA, 414 bp, homo sapiens
gttggtatcatctgttgccttggcgatcactcagtgatgagtcgtcagtattttgacatgtcccagtgcttgctgtacaagaggggactcagatcaacaggaagactctgaagacaggaacctgcatggtatcttacatctttgatacttgggtgctgatatgaagcagagttgttgatttactttatctaggcccttctttcttctcacctggatcaagcaactgagaagtgtatcaggagacactggatacatatctctatgaaatagagagggccatcgcagggcctggtacttaactacattaacgttctaaaacccagtttggtttacgttgtctttcacagtagtatatttagctcttctctggaaagttgtgggtaatataattccttaaacatgaaaatgtaatta

SEQ ID NO: 1223 - DNA, 153 bp, homo sapiens
  misc_feature (133)..(144): n=unknown
ccgacacattcaatcacgtcttcgcccccttcttcgagaagcgccgacaaacaggacgagcaaccaatagcaaccgagggcggctgcggcgcgcgcggagggccggggtcgcagggtaaatccggggcgaganctggcgcgaancttacgcga

SEQ ID NO: 1224 - DNA, 242 bp, homo sapiens
  misc_feature (242)..(242): n=unknown
gaaatcttttctgaatgatcaatgcatttcaatttacgaataataatggttattggggaactgtttattatagataattttaaggtgtatagctattttaaagggggtccatttacatcaaacagctgatcagaggactctatctaaattgtgatcgtggcagatagagatggagtcatgtactctatctggctctacacatcaatcacatcttgattcaaacctcacaaggcaatattccn

SEQ ID NO: 1225 - DNA, 492 bp, homo sapiens
  misc_feature (417)..(470): n=unknown
ggtggttagacacccccgttttccactcctgtcctctctgaggtccccacacggcatttagccattcagctccttcgccgcctccagtctgaggctgttcctctgtctggctttcatgaccttgaccctgacttgtgctcacgggtcaggtgttttgcagaaggcgtctgagtccacgtttagtctcgtgcgctgtcacgatcagacgatcagacggggcttcagtgtctctgctcaaaaccccagggatgatgctgtgtcaccctcccagcgtcaggctgggaggcagacgctgttggggcctctcatgccgggctgttgaccttgatcctttggctaaggtgttggctcgggctccccatgcagttaccctcccctcggcgttactgagcatgggggtttcgggtctgcgtcttnacagatattcgagtctccaaggagattctgcctgntcattctgctgtgtcanngcggggtggggggtggaatttg

SEQ ID NO: 1226 - DNA, 371 bp, homo sapiens
  misc_feature (341)..(369): n=unknown
ggcatcgcaggcttgcacctgcccaacggcggtgtggagggtgccgtgctgggcaaggggggcaagccacagtttgggctgggcgagctgtctgcccatgccacaccggccttcactgcggtgctcacctcgcccttccccgcctcgggcatgcccgtgaaatttgaccggactctctacaatggccacagcggctacaacccagccactggcatcttcaccttgcctgtgggcgggcgtctaactactttgcttacatgtgcacgtcaaagggcaccaacgtgtgggtggccctgtacaagaacaagtgcgggcaactatacctacgatgagtacaagangggtacctggaccaggactgtgggcgtntc

SEQ ID NO: 1227 - DNA, 483 bp, homo sapiens
cagttaacatggttgcttgtcttttcaaaaagaagttccattttctttgattcccaagtgcatttttcctgaatcttctgtgatacagggcacatgataggtatgtagagagctaagcttcctataccaagttagaagtgaaatgactagtggaaaacatttaaactttaatcttaaaaaaaaaataggaatcaatataaaaatgcacaaggtaatgtcgttttcatagttaaaatctgacattgtttatcaaagctagtcagttaagtggacacctgcaactcaaatcccataaacattttagaaacgccaaccacccctcctgaaaggtttgaggaatgaaatttggcagaagctcagctctgtgaaatagctcccgttttttttcttgggaccctacttagttccgtgggctcccattgggagctgattaaatttctgccaatcagaacccatcccctaacacatcagatgatagtgggc

SEQ ID NO: 1228 - DNA, 369 bp, homo sapiens
gcacaatgggagtctgggacttcaaggcacagcagagttgctccgtctctctaaggcactggctgatgtggtcattccccaggagtacgggatcagtcgggaggagaaactggaaattgctgtgggcttctgtcttccactgttgcggaagatactacttgacctgcagagaacccacgaggatgagtctgtcaacaagctgcatcccctgtactcccgaggcgtgctctccccaggtcgccacgttcgaacgcgtctctatttcaccagtgagagccatgtccactccctgctcagtgtcttccgttatggaggacttcttgatgagacccaggatgcacaatggcagcgagctttggattatcttag

SEQ ID NO: 1229 - DNA, 441 bp, homo sapiens
agtggagttctttctgatttatgcagctgaaataataagagcaataacataagcagtgaaaatgagacagtggagtatggggagcaaaaaataagtcattaggcagatgatcaacagccaggataaaaatgagtgacatgaaaggatacactcaaggacccatccggcccacaaagaaagaggtggcctctgactgcagcgcacatgaagcctgctcaacagcctctgggcatgtgaaatctgttctatacgctgaggctttatagagaaacgcactagctggtgttgatctcccaatacaagtttcttctggcgggaaggatcgttagtcggatgctttgcaaacgacacagaaaatcgttttacggccgggacaaacaagagctcatctcggtgcttcagactggcaggtggtagctttttgccatggctgcgggcgta

SEQ ID NO: 1230 - DNA, 439 bp, homo sapiens
  misc_feature (34)..(48): n=unknown
  misc_feature (398)..(439): n=unknown
cccattgttaccaatgatgtgattatgaagttanctgaatctatggtntacatttgaagaaatagttcagaattctctactacattgtaagttacttgctaatagagattgggcattattatgtactactccccttctcacatcctacccaaagtacacaaggccgtagtaaaatactgttgctactaaaaactaaacatactgtggttgctaatgtcctttacatcttcagcctatagggaatggtacaggcagaaacaagcaccattaagtatattatcatcagtagtgagatctgtatgattaggatatctttgcttaagcccccaaaggaaaaattctctagcattaaaaacatggctggaacatagctaagcagttaacctaattagtagacntattgttaacgttcagtcctaaaaatgaaaagcttcagttn

SEQ ID NO: 1231 - DNA, 500 bp, homo sapiens
  misc_feature (312)..(312): n=unknown
tgttgttgtttctactggtcggtgctcgctcactaatatccaatcctagtatgattttcttttacttgtgtctattaacagggttatgtcacaccttgtcaacctcaaaacagatgatactcatcacttgtcttccatcttgctgttctattatcttcctacaaaaatagctaatttgtcagatttcaaagccttgttatttactgatgagcttaccaactggaccttttgtatcttcagtgtgtaattctgaagatgcattctgatacactagtgaactgggggtgacggtgaaggggtggtggaactaanggggtggggcggcgaacataggcaatatgccatttcctcaccatcccatgcttgtcatgtgagacaacagaaaggataaagaatactctattttttattctgaaaagataattatagcaatgataccttccattctgtttatttctggatattttggcttcaacaattctttatatcatattttattc

SEQ ID NO: 1232 - DNA, 410 bp, homo sapiens
  misc_feature (310)..(408): n=unknown
aattattgtaccagggcccgccgaggcacgaggcactctattttgttttgtaatcacgacgactattatttttagtctgatcaatgggcacaatttctaagcagcgcagtggtggatgctcgcaaacttttgcgcaccgctggaaacccactaggttgagttgcaaaacgtaccgcgtagacgcccctggtggcgccgagagaagagctaggcctgcccagcacagagccggagagcgtcgggccttccggaagggtcgacgagatgagttcctacttgacctctgagccgaggtgggccggaaaccgangcctaagccccgccggggctgcaaggaaaaggggaaactccgagcgtangcnttttccttgtggttcctttctcccggcatcncggactgcgggcccntg

SEQ ID NO: 1233 - DNA, 492 bp, homo sapiens
catccacaattgaaatttttttctaagaagaaaaggagaataatgtattcttttcactccattagcccttgcagacattaatgccacaatttctaatgctcagacttttctccttccatttagaagaaatggccccaggcaaagaaaaaagttgcctggactgatgtggggagcctcctatgcagataggtgtagttaacaggtgtgaagagattaagtgacacctaaagtcccaggttcctggctgagatgtttgggccacgggtttcgattaagatacaccataggctctacacgatcggccctggggtcagcattctgaattcaaagatggggcttttgctcaggacctgaacccacctggtactaaatctcaattttctcccctgtttaaaaaagggggcagttttaaaaatccctgctccgttgaacccactaaggaggctccagaaagtcaagaacgattggcagaaacgcttttcaggcctcaga

SEQ ID NO: 1234 - DNA, 428 bp, homo sapiens
agttcttgctcttcacagaggtagatttttctttaccctacagcactgttgggcatccctcccatcacatgggtctgtgggtgagatatgttatgctgttcctccctcgggaaggttggtattgaggggtgccttgctccagaggcgccagccagcatctgtggtgagttggctaagatccagagtgacctgctcagagctccccagaggccttcactctttggggcagtctctctagggtcactttctgaatgtaccttctacctaaagtatacaaacacaaagagccagctgagctggttctagtgtgaaagccgtaagtgccacccagcaggcgtttgaaaacaagaaatcattcttctgtggaaggagaatgtgccatctcagctaccctcagtccgccaggggagcccagtctgtgtattcat

SEQ ID NO: 1235 - DNA, 287 bp, homo sapiens
  misc_feature (2)..(283): n=unknown
ancgtgcccaggagcttggcgtgctgcangattacntgctggccctaaccacggacgaccaccttctccgctgtgcggnacaggctctgcagaacattgctgccatcagcctggccatcaactacccaaacaaggncacccgcctctggaatgtggagtgttagcccttggtggggcgtgcatgggnntagttcatctnccacagggattttanancngacntcnaanntcattcaggaaaactcctgtagcgccagtgcccagctctcnttgagctgaccantcca

SEQ ID NO: 1236 - DNA, 373 bp, homo sapiens
  misc_feature (366)..(366): n=unknown
ctttatttgaatcctgattcaaacaagttaattttaaaaatctttttagaaacttcaggaaatgtgtacgctggatattgtatgacagtgcggaattattcatttaggcatgaataatggtaccgtggttgtttttgaaacctatctgttaaagatactatgatttatggattaaatgataaaatgcctggaatttgcttcagaataattcatattgagtggatgggggttcaaatgaaacaagactggctctgattttggtaaatttgaagctgactgatggaatacttgtactattctgttttttaatatagctgaaatttttataagttataaaagaaatatgcaatcctaggtgtagtggcntgtgcct

SEQ ID NO: 1237 - DNA, 380 bp, homo sapiens
gataaatgctagtcactgcatcagataactccacctaggttgctaagatgataagtttggacattttatattagtcttccatgcatagccatgtaatttttataatttttaaaaagttgtctgtatcgtagggatagaatgtctgatatgttgtcaattttttatcatttttctaggctccatctcactctttcagccaatattttttgaaacatgattgtatttgtaattatattatagcagatgctactatggccattatttttcatagaaattactatcattactgctttgaccttcaggggcttgactagactaagatggagatggagaagatggtgttatgtctcccctcttacccctgacacattttccagggt

SEQ ID NO: 1238 - DNA, 370 bp, homo sapiens
  misc_feature (12)..(42): n=unknown
  misc_feature (183)..(357): n=unknown
cctcaccctacngtagannatnancnnggagtntctggggancctgagcttcagtctggaaatggagtgggggcctaggctcttttacccatggatcaagttctacacctggcagaaggaggcatgcgctcacctagcccaaaaaggagtgaccatggtggatactgaaggtgtggtacaagngntccccaacatctccagcaggatggtaatgtcaagcccaccagnatttcatgtggcctagttacgaagagtctggatgtttgggntccaccttggcccttccaccagtcacctgtatgattgggggcaagtcatttaacctttctggncttagtttcctctgctacacaatgnaggggttgcatca

SEQ ID NO: 1239 - DNA, 405 bp, homo sapiens
gtgggtacagggctgacttctggatgccagcagtgagaggtgaagactctgggatctatagctgtgtttattatttggactctactccctttgcagcttcaaatcacagtgactccctggagatctgggtgactgataagccccctaaaccctctctgtcagcctggcccagcaccatgttcaagttagggaaggacatcacccttcagtgccgaggacccctgccaggtgttgaatttgtcctagaacatgatggagaagaagcacctcagcagttttcagaggatggagactttgtcatcaacaacgtagaaggaaaaggcattggaaactacagctgcagctaccgcctccaggcctaccctgatatctggtcagagcctagtgatcccctggagctggtgg

SEQ ID NO: 1240 - DNA, 413 bp, homo sapiens
cctttcttgattggttcttccaaacaaatgaggcatcagtctgaaagccagggagttggtctgagtgacaaggaattggtttcagatgatgaagaaagaggaacgggcttggaagaaaataatcaagaagagcaaagcatggattcaaacttaggtgaagcagcatctgggtgtgagagtgaaacaagcgtctctgaagactgctcagggctatcctctcagagtgacattttaaccactcagagggataccatgcaacataacctgataaagctccagcaggaaatggctgaactagaagctgtgttagaacagcatgggagccagccttctaacagcttacccttccatcataagtgactcttctgcccttgaggacctgcgaaatccagaacaaagcacattcagaaaaa

SEQ ID NO: 1241 - DNA, 335 bp, homo sapiens
gggattttgctgatgagatgatactaaacattgagagtactgctttttactctgacttttattgtgttgtctttgaaagacaaatagtacaactttttacaaggaaacacgtaagagatggatgtccatgaaaacaatattagtatattctattattgtttcttattaatagttacttagtatttacaaacaatttattattagctgtgttaacttttattctatgcttcatatgctctgacattgacatagtggatttctgctgatttttttcaaatccgcaatctttataaccaactgaagtatataatagagcatacatttatctttattgt

SEQ ID NO: 1242 - DNA, 259 bp, homo sapiens
aacgttcgaattatacaaaatattattttgagccactaacagaagggaatataccaaccatagtttgtaggccatacaaaaataggcagcaggccagatttcgcccatgggtggtagtttgctgacgcctgctctagattaacaaatttacgggctttgcaagctttgtcgggcaaggaggcttgacatacaggttggtcgtgccgaacaaagaggaactttctaagtataatagaaaaaagatgtcatgccgtccttc

SEQ ID NO: 1243 - DNA, 420 bp, homo sapiens
cagtattcctggcccaatgacaaagatcctgtggttgttccttttcctactatgacttttgctgaggtgctggccacctatggaactgataaacctgacactcgctttggaatgaagattatagatatcagtgatgtgtttagaaacacagagattggatttcttcaagatgcacttagtaagccccatggaactgtgaaagccatatgtatccctgaaggagcaaaatacttaaaaaggaaagacattgaatccattagaaactttgcagctgaccattttaatcaggaaatcttacctgtattccttaacgccaatagaaactggaattctccagttgctaatttcataatggagtcacaaagactggaattaatcagactaatggagacccaagaggaagatgtggtcctactaact

SEQ ID NO: 1244 - DNA, 490 bp, homo sapiens
tatgttatctcctctgattccagcaataacagcccggtgaggtagccagggcaagtatgtattttacacattagcaggaagggaggctaagcgaggtttatgtaacttactcaggctgaaacactgaagaaaaatttgtgactctcatttcagtgatgttttctgcattattaaaaaatattatgctactcctcactatattatgttgatggttgaaatgtcattataaagcttaatttatatgattctcttgatgaggatgatgaagcaaatgctccatcaactcactagtttacaggggcaagcattttcctacatttcacacataatttgattacctctgtcctaagtgaataatctactatctgggtatgagaaacatgatttgaaaacactaaaccactatattatttcaacaaagaaccatctttcacacctaagtaaaaaggaacttcaaaaaaagtcctaaccaaaaaaaatccaaatgatg

SEQ ID NO: 1245 - DNA, 395 bp, homo sapiens
gtttgtcagtataaagagacagatcatactgtgtatggaagaattagaccacaccccagacacaagctttgaaagagatgtggtgtgtgaagacgaagatgccttttgtttgtctttggagaatattgcaacactacaaaagttgctacggcagctggaaatgcagaaatcacaaaatgaagcagtgtgtgaggggctgcgtactcaaatccgagagctctgggacaggttgcaaatacctgaagaagaaagagaagctgtggccaccattatgtctgggtcaaaggccaaggtccggaaagcgctgcaatttagaagtggatcggttggaagaactgaaaatgcaaaacatgaagaaagtgattgaggcaattcgagtggactggttccagtac

SEQ ID NO: 1246 - DNA, 490 bp, homo sapiens
  misc_feature (483)..(483): n=unknown
ataattgtatattttaaaaacaggacacgtactgtatgagtaaacagcgtggctaacaccaagtccacactggtaagcttttgagaaccatttacactatgttgacagtagtactgctgcaggcagacagcggaagaataaataatagtgcttcaagaagagtagtgattgagaggataggtaaagagggcgcctcatcgtggaagctagagcaggaacacctccccagtagtgacatgtgcaaagttccagatctccacgacaaagacagctcaacccattggaacaaacagactcccaatgtggctggcaactgcgggggtagaagaactcaggcaaagtaggcacaggaatgggggagatgagagccaagggacaaacgccgagaaagcgttccgacaagcatgtgtgttcatacatgcatacccccaacaaagggcaatgcactgtgtaacagaactgaacacaattttacaaagctgntccccag

SEQ ID NO: 1247 - DNA, 431 bp, homo sapiens
  misc_feature (237)..(324): n=unknown
ggaatacattctctggcatagccatagtcaatcaccagtataattaatgtaaatggacactggatagcttttttgtgaattctgatgcagcacaaagagactttaattgtttccaaaaagaaaatgtctgagattaaaatctagagttttatgacttagaggaaattttatagctttactccaaaaagggtaaggcacaaaatattctgtgccaaaggatgcatatttggaattttncctatgaancccttngngtaagngncatgatgaaattttcttggtttcaacacagatgatgtgttgaggtagtgttgaggctgananccccggtgggatgggtcttggagaaggaaaagatttgttttgcaaggtttgtggagagctgatgcggtagtgaggctaagacgaggggtatttacttgctacttaca

SEQ ID NO: 1248 - DNA, 469 bp, homo sapiens
  misc_feature (461)..(461): n=unknown
tgacctcagtgtattggctcacatgtgttaacatattttaagaaataaatcactgtgcaaatttgaagtatttgaatagcactatcattatttgattatatttttatatattttattatatttatctgcatttggtttatatccacagggtttttagtcatagatacatctgtaatttatatgccaattacatatgataatgttatttgtacctccaattttttttctcatattggtgatccctaattccaggtgtggtagagctcacagatcatgcacaatcttctcactatgtgcaggccctttggtagcaaacacaaaagaaaatcaagagatataaagagatcatacaaaaggaattttgtatatcttctgtaaacagaaagacagattggaaatttgtaagcaaagttgcaatatggaaataggaaaaggcatttctgaataagggggatgtttantcaagagg

SEQ ID NO: 1249 - DNA, 419 bp, homo sapiens
  misc_feature (209)..(355): n=unknown
gtgtttttcagatcctgaattccagcagaatggctagtgccaaccagcctgaagaccctcaccaaggaaccaactcagcacaggaatgccatttcttcatctccctgtcccatgatttcacccctcacttcttgaccaatcagcgatccctacactagctcatcacccatccagaccccttggaagcccatccccaacctccctggtanggctggcaagtggagagtgaagacttggaagcagcagcacagggcacatgatcttgaccctgctgtggacactacagcacagcanaaagcgatggcagcatctgacttcatgggcagcccaagcagtctggggtgtgggcggtcanagtgtgattattagtcagcgttaaagagactacattaaccaatgccataaattggactggataa

SEQ ID NO: 1250 - DNA, 397 bp, homo sapiens
  misc_feature (59)..(367): n=unknown
caaaatatcatctccacatctaatccatttacaaaatgtgtcaatgaggtatttcactnnnnnnnnnnnnnnnnnnnnnnnnnnnnnnnnnnnnnnnnnnnnnnnnnnnnnnnnnnnnnnnnnnngtcacatttcaagtattcagtaacccacatgtgggttgaggttcccatatggaacagcactgttctctttagactgttaggcccttttaccacttcctttgaagtgaggttctctcatgctcctaccactgctgccacatgagaaaggannnnnnnnnnnnnnnnnnnnnnnnnnnnnnnnnnnnnnnnncacagnatacatgtatccacaggatttgatatagatttgcattttcaagggncctgcctaggagcacatgaggactctacag

SEQ ID NO: 1251 - DNA, 388 bp, homo sapiens
gtgctttcaaaagaattggcgtccgctgttcgcctctcctcccgggagtcttctgcctactcccagaagaggagggaagcacagtatgaagactttggagactcaaccgttagctccggactgctgtccttcagaccaggacccagctccagcccatccttctccccacgcttccccgatgaataaaaatgcggactctgaactgatgccaccgcctcccgaaaggggggatccgccccggttgtccccagatcctgtggctggctcagctgtgtcccaggagctacgggagggggacccagtttctctctccactcccctggaaacagagtttggttcccctagtgagttgagtcctcgaatcgaggagcaagactttctgaaaata

SEQ ID NO: 1252 - DNA, 270 bp, homo sapiens
  misc_feature (30)..(250): n=unknown
tccctccgttcctccctgccctttctcgcnctgatgatcatcagggatgctggagtctggcgcccccccacaccaccagagctgaagccgacattcnaggtggacgtggcgcgnagagagcaaggnaaggcncanctcctctccttcgtccccactctctntgggctcaggaaacacacnctgaccggangcagtggccaggagnggcaggctagggngcaggctcacgccattggtgcagtnnttctgnggcagaaaactcaacacggg

SEQ ID NO: 1253 - DNA, 309 bp, homo sapiens
  misc_feature (285)..(296): n=unknown
tggaggtctgggccatggctactgagcgaggccctctaccccgagctgcatggctgtggagatgcctttgacaaaggatcgctggctagctagtgctggggttcagaggagagccatgtttctgcactaactgaaggctcccctgtggccagcactgttctgggtgtggcaggctggccccccggcaggagagagctgcccgaggccctgctctcctgcagcttgcattccccagtatgggacgtgaaccttcaacaaataaacggattcatgagcaactgtcangtagtgagaantgatgctgtagtg

SEQ ID NO: 1254 - DNA, 367 bp, homo sapiens
  misc_feature (334)..(352): n=unknown
ttaccttcaggctacatgtataaggtatatataaaacatgaatgaatttcatgtttagacatgagacctaccaagatacctcattatgtatatatgcaaatattccaaagtctgaaaaaatccaaaatctgtaacactcctgtcccaagcatttcagataagaaacgcttagcccgtcttgggaaacagcagccactggatggaaaggggcagccagtagcagaggcctcagcccctgccttcatcctgagaatcttctgtaacaaaagctgccagctttcagggaagaaaaagaattctgtggccttgacttaagcccagagaaacaggaacngcnaaaccttgttacccagcagaacagacagag

SEQ ID NO: 1255 - DNA, 295 bp, homo sapiens
ctcttgggaaactactcctgtaaaattgaagttggaggtaggcgtgggctgaggaaagaggaatcagattaattctctgggttgcaaagaggctattctgcaagccccttacagtggccctgaaagctcaataagtgttttgtacctcttgtaaatgtgccattgtgtgaagcattaaacccaacatctagaattcaggattcatccagaataaaaggatgtaaaatctttcccaacagaagagtgttacttttggtcagacaacttcatgggttcttactgcacattaaattat

SEQ ID NO: 1256 - DNA, 386 bp, homo sapiens
  misc_feature (352)..(352): n=unknown
agaacttactcacttggaccgagaatatattgtaatgttccataagtcataacttaaggaccgagaatatattgcaatgttccataagtcataatttaatgtgcagtaagaacccatgaagttgtctgaccaaaagtaacactcttctgttgggaaagattttacatccttttattctggatgaatcctgaattctagatgttgggtttaatgcttcacacaatggcacatttacaagaggtacaaaacacttattgagctttcagggccactgtaaggggcttgcagaatagcctctttgcaaccccagagaattaatctgattcctctttcctcagccccacgcctaccncccaacttcaattttacaggagtagtttcccaag

SEQ ID NO: 1257 - DNA, 587 bp, homo sapiens
  misc_feature (373)..(375): n=unknown
  misc_feature (536)..(536): n=unknown
gtctcctgttgtagttcggttgccttctgtgtctgatgtctcagaggagaccttgactagtgaggcagccatggagactgacatcacagaacagcagcaagcagctatgcagcaggaggagagagtactgactgagcagattgagaacctacagaaggagaaggaggagctaacatttgagatgcttgtactggaaccccgtgcctctgatgatgaaacccttgagtctgaggcctccattgggactgctgatagctcagagaatttgaatatggagtctgaatatgctatctctgagaaatcagaaagaagcttagcccttagctccctgaagacagctggcaagtctgaaccttccagcaagttgcgaaananttaaaaagcagcaagactctttagatgtcgtggactcttcggtctcctctttatgtctgtctaacaggcatcatctcatgggaccagaaaactatttcagatttattccaaatctccattctaccgagctgcctcaggtaatgaaggcctgggaatggaangaccattgggccagaccaattcctggaagacaagcctcagttcatcagcag

SEQ ID NO: 1258 - DNA, 452 bp, homo sapiens
  misc_feature (452)..(452): n=unknown
ttcagaaatcttaaaatagagggattaggctttttgtttgtaagtaagtttttggaaaaaaattatattctaccctagctcctaactatcccaaaataaacccaaaggcttttgctttcacggttaagaaagatttatacgttttcttcaaatgtcagaaatgagagggtccctcaggacagcaatatcccccctagttcaacacccacctttgggaagggaaaagagggtgggggagaggcaactacaactgacccaaatccccaggccctaggtggctttgtatagtaaaaatctcaattcaaatacaacagccaaggcacagctggcaccatccccagcaggctttctgcttctgcaggaggcccaggaattcagcacatacagtcttagccatatgcttagaaaagaggcaggaccacaattaggattgactattgtggacgaggtgn

SEQ ID NO: 1259 - DNA, 550 bp, homo sapiens
  misc_feature (412)..(511): n=unknown
ggaactcgtctattctgaaaggcatttgagaaatagctgaattcctggctgcttttttgctgggggtagatggtggaatacttctggtctagatataacttaccactaagaaacccccagtatgtcaccactgcctaaatctaactagaccagggtccaaatgccatccaggccaggcaggaaatatacctcatgtgaaagacagtaaggagttgtgggcagtgtaacaaacaggagagctatgccccaactaaaaggagcagctgctactgcttagtttcagccagttgcaacagtatgtgggaatgtaggctgcatggttgttaacaagatagatggtaaaaagatgccagaagatacagaagatagcaaagaatgtggggaatttggataccacacatagcgagagacnatgaagcatgcttcccagctcgccagagtgtcacacagctgctcatctgccacctgccagacattaatgtttcctgcnctacctaaaccccctctttanctgatattttaattcgagactctagtacatgcccactac

SEQ ID NO: 1260 - DNA, 412 bp, homo sapiens
  misc_feature (67)..(165): n=unknown
  misc_feature (360)..(360): n=unknown
aaacaagcagaaagagcccagtgtccatcaacagaaagataaaaaaacaaactgtgatatattcatnnnnnnnnnnnnnnnnnnnnnnnnnnnnnnnnnnnnnnnnnnnnnnnnnnnnnnnnnnnnnnnnnnnnnnnnnnnnnnnnnnnnnnnnnnnnnnnnnnnttttgtataatttcactcatatgaagtttagaacaggtaaatttaacctttgatataaaagaatgagaacagtagttatacctgaggggtggggaggggatagactgggagagggatttaggaaactttctgaagatgattgcaatggtctaaattttggaaagggtttgggttacacaggtgtatatgtctgcnagaactcagtaaatttatacttaagatttgtacattttattgcaggtaaatc

SEQ ID NO: 1261 - DNA, 601 bp, homo sapiens
gcaatctgcctctctacagggtctaggaagcccagagggaggtatactccatgcctggccgaacctgatagtgactcctatagcagcagcccagacagcacacctatggggagcattgagtcactctcttctcattcctctgaacaaaatagcactacaaagtcagcttcctgccagcccagggagaaatctggagggattccttggattgcaaccccatcatcttccaatggacagaaaagccttggtctgtggacaactagtcctgaatcaagttccagagaagatgcaaccaagacagatgcagaatcagactgccagagtgttgcttcagtcactagcccaggagacgtttccccacccatagacctagtcaagaaagagccttatgggctttcaggactgaaaagagcttctgttcttctctcagatccatctctgcagctgaaggaaacaagagtacagtggatctattcaaagcttaacttctgtaggttccaaggagacacccaaagttcaccaaacccagacctgctccgaaaatgtgcagggattaagactagacatgctcaagcaatggtatcagggcctggtcagtagt

SEQ ID NO: 1262 - DNA, 374 bp, homo sapiens
cacaaaacaatttcaacctctgtggttcaaaataatttaaggatcttgtacctttgtgtttattttctgtttcaactaaggatagacttcagaaggcatagcttcccttgtaacgtttttaaacatctttttcatttgtagaagaacatttcaaaagcccaaattaaattatcattaaaatactttgacactttacaatcttccaagtggaatttaagttgtatgccttgatactgtagttttacagtttccccatcattggtaaatattcttctatgatgccactataatgctactggtagaaaatatgtgcatataatttatcagtatattttcatgtaaaattttataaaaatctccaaagtatggaagta

SEQ ID NO: 1263 - DNA, 419 bp, homo sapiens
  misc_feature (64)..(64): n=unknown
  misc_feature (357)..(357): n=unknown
gatgacttgaatgatctgtgtaccagtgcagtaagcccaaatactaccaaagccacgcggtacncttgaatgtgtggcgttattggtgcatgaccaacgggctcaaagaccacacagacatcaccaagatccctgcagtgaagttgaacgagctgctcgagaacttttatgtcaccgtcaagaagagcgacggctcggacttcctggccacctcgctccatgctattcgccgaggcctggaccgcatcctgaagaatgcaggtgtcggttttccatcaccagcagcaccttcagctcctccaccaagaaactcaaggagaagctgtgggtgctgagtaaggcaggcatgtcgggcgngcgttctcgcaacatcgtctattctccctttctgacgagaggagatgtggcaggcaggtgtc

SEQ ID NO: 1264 - DNA, 339 bp, homo sapiens
aaatgaatttcctcactcttgtatgtaacaattatacattgtgttagattctaaaagctaacgaagttgacgcacatttggataaaccatccgaatgatttagactcatctagtttcattttaaaaagcaaaccccaagtcaaagggagggcaggccacaccaggggagagccgccagaccgggaggtcacacctggtcagcccctgcctccaaggagctccagctgctccaaccctggctggcccgagcaggtgacagggcagtggccgggccccagtgggggctcactggcagcagctgtgggagccaagcctccgggagacctgagtgaacgagac

SEQ ID NO: 1265 - DNA, 89 bp, homo sapiens
gaggggatctaaatgttaagttgaatatttagaaataaaagtgtctacaagaagaaaagtctttagtgaaaatatgggcataggccagc

SEQ ID NO: 1266 - DNA, 476 bp, homo sapiens
  misc_feature (178)..(470): n=unknown
atttcatgtcatttaataattttgaggcaaaaaataaacagaaataatatccaaagacattttcagtttgttcattgattgccattctaatacataaaggtaagaattttagtgaccagtgttttgtatctgactcttattttagaatttccagtgttccaaggattccttattaatnaattcnctcaggtcttgagngaaaagttttgatntagaaaagcagattntgnnaaatatacnnnaagngtggcaaatggnttagacagtnatttggacccttganaattttatcaagctgtgtgatcaaaaagctagtccttannaattctcnaagtatggaaaggaaggaagggntactacttatgttaagcaanattatcccattttgaganaaacaagacgatctccgcatggaagtttctttgcttntcattttaaggtactnccagagtagcaatcttgttcatgtnaaaatc

SEQ ID NO: 1267 - DNA, 256 bp, homo sapiens
caagaagacagctcatctggtttcttcctgcatcttgggacactccttccctgtctataccactgactcttgctctggttgttgtactcttatacgtgaatagactcttaattcagcacctatagccttttgttgtgcttttttgatgtgtctgccttcattagactatgatgtctttgagagcaaagactatttttccttactctttgcatattctgcatctgagacactacttgaaatatggttggcatcactg

SEQ ID NO: 1268 - DNA, 439 bp, homo sapiens
ggcagccacgttttgtgggccgtgtttaagtcccggttctgccggcctgtcagcttcatgtcctccactccctcaggagcactgtgggtatgagaggacctgcctcacagggtggtggtggcctgggtagtggctgctgctgctgcccctgtgtgttgtatgtttatccattgtatgtggagttctatttgggttcatttactccctcagagttgaaaccagaacatagaaaacctgagcttcctggaaggtaaaaagtgccgtgaaccctagaaatcatttagacaggtctcagttactgaaatcacatgtctaagaaagtgtgaccagctaacgactctggcctggggctcagcccactgacatccgagttctggtctttgtgaaaagcagcagagagcagctctgccggttgcaacttctcgtctcttagcttaga

SEQ ID NO: 1269 - DNA, 501 bp, homo sapiens
aatattccatcaaattatccaggaaaatccaggtggcagaaatatataatatgtccatttcatcaagaggtctcaaataaattttaaaaggccagaaaatgatatatatactatgccatttaaatcacttctatcttctgtacttaagaactcaagtatagaaataaactgtgggctgaagtaacattgtaacctgctcccaacatgactgcataggtgtctaaggttaagtgtgaagattactgtgaggtctcaagttacttgactaatcaatcccatttgaatttcaatccaagcagcatattttacacacacctgaaggaaatatcttcagtgtgttcatgtgtgtgtctatgtgcatgtatgtgtaggggataggtgtaattagggaagggctgaccgaacaacattgataagtacatgctagaagtctgctgttgttggtaacacagaaacatacacagtcttcatattcaaagtcttcacggggatgtcttctgt

SEQ ID NO: 1270 - DNA, 366 bp, homo sapiens
  misc_feature (116)..(253): n=unknown
tgctgggataacaagtgtaagtcaccacacccagcctctgatttcttttctaaggggatgacctatttctgtttataatccaaaatttatcagccttggccctactgatattttgnnnnnnnnnnnnnnnnnnnnnnnnnnnnnnnnnnnnnnnnnnnnnnnnnnnnnnnnnnnnnnnnnnnnnnnnnnnnnnnnnnnnnnnnnnnnnnnnnnnnnnnnnnnnnnnnnnnnnnnnnnnnnnnnnnnnnnnnnnttttaatctatgtgtaacacaaatttcaaaacactttggtgagtacatagcatggattatgattttttaaaaactttgtttctttttaagctgattctattctagtcatggtc

SEQ ID NO: 1271 - DNA, 401 bp, homo sapiens
  misc_feature (157)..(304): n=unknown
caatgatgatgtctcttaggctgccccgagcaattctttccctctgccacgttctctcagggcatcattggagatgcaacaccacctgcacttaagagagctgcgtgcttcaggtatagcgatctgtgtgttgtagctggtctgaaataactagacnnnnnnnnnnnnnnnnnnnnnnnnnnnnnnnnnnnnnnnnnnnnnnnnnnnnnnnnnnnnnnnnnnnnnnnnnnnnnnnnnnnnnnnnnnnnnnnnnnnnnnnnnnnnnnnnnnnnnnnnnnnnnnnnnnnnnnnnnnnnnnnnnnnnaattccatgctatctcatgacacatcagttctaaacacattgactggttttaccccattgggcagtttctgtttacacccaggtctgtgggcatatg

SEQ ID NO: 1272 - DNA, 432 bp, homo sapiens
agaatacacaatagtttcttaggagtaattattacctttgaagagtcagaatggggaggctaagtgcagaagaaaattttctatctctgcccctttgtatcgctggaatgttgttgaacacgtattacctttataataaaaaaaccagagcactgaatgttttaccagcaactgatatggtgacaactgtaagtagaactaataaactgcctaatgtgctggtaaaattcaagaggaagttattttttattattaccaatgagtagaattatatccatgattacaaaaattaagtaatgtagaggggttgctattaaaattataattaatcctaagtgcctgacaatgctggatacattaaaaatgtatatttgatagtttttaattcagagtcatttcttttctataaaaaatgcaaacaatttatatgca

SEQ ID NO: 1273 - DNA, 126 bp, homo sapiens
  misc_feature (122)..(122): n=unknown
agctcaatgttaaggtcttctgggaccacagtcttctgtactccattcagtcattaatccaccaatttatttattcattcaggcagtcagtcaattcatcaagcattttttgaataccaaantttt

SEQ ID NO: 1274 - DNA, 437 bp, homo sapiens
gcgtcctcttcctaggtccccgcgttctctgcacgctgaagtcgctgcagtgacctccgtacctgactcttaggggatttctcctgagaatttgggggccgggggagagggttgtaggcctaatccgttgttgttgtattttgactgggggcttgatttcttttgtcgggagctgagccaggaagggttcgcatggctgcggtgtgcttgctaatatcgtcactctgacttctgcagagtatccgagaggggtctcctgggatctcagttttaaggttctctggaaggtacaatggtcagggaccccactcctccaggagattctgatcaaaggtcacgtacttcgccagcctctagtgtccagccagaagtcttaaatttattcatccgtaagattgagataacatctggctgggctgttgtgagcattgaaagag

SEQ ID NO: 1275 - DNA, 461 bp, homo sapiens
gggtatacatatatgtcaaaactgatcaaaccaaacttacgctttatatatgtgcagcgtagaggtcttcaattataactgaataaagttttctaaaaaatggggataaaaataacatcttcagcctgttgtagggattcactgaatatgttaaagcactttatcataatacctggctccgagtttgatgccgctgacacttagatatcaaactcaacctctctaccaagctcttcatccaaacagactaggggtaaagactgtctaagactatacagaaagatcatgtatctgaggaattaaaaatagggcataagatttggcaatgtgtcactcggcaaactcaataaactagtattatcaaggcaaaaaatatatacacaaaaagaactgggttaaaaaaaattttttctatggacttttaacgtgataactcatgacacaggggttaggtcttcagt

SEQ ID NO: 1276 - DNA, 286 bp, homo sapiens
  misc_feature (275)..(275): n=unknown
gcgggatggcaggggcgagctccacgccctgtccccgtctaagctaccacctttacttccaccaggctgggaaccagggcttccttggttgtggtcagcaatgagtctggatgacaatttgtcgggcacgagcggtatggaagtggacgaccgcgtgtcggcgctggagcagcggctgcagttacaggaagacgagctggcggtcctaaaggcggcgctggcggatgctctgcgtcgcctgcgggcatgcgaagaacagggagcggcgctacgcngcggggcaccc

SEQ ID NO: 1277 - DNA, 205 bp, homo sapiens
  misc_feature (201)..(323): n=unknown
gcaggagtttaaatgaatggggtgaccctctaagtactgggaaggaaagaaatctaaggcatatcatgaagtgaaagaatcacgttgtaagatgttaccctttatgtgaagaaaaaattttaaaaaccacaaaacaaatctattttgcttatgtaaatatgtatgtaggtaaatggggaaaagtctggaagcctgtatacnaaat

SEQ ID NO: 1278 - DNA, 503 bp, homo sapiens
  misc_feature (267)..(323): n=unknown
caggatatggctatactgacaaactcatcttggcattaattgtgactgaaatactaatgattttgattatacttttctgcctcattgtggtaaggacaataattaattcaggttgtcagaatgcagtcctgtttctgtgtggattcagagctcacaaactgaaaaccaaagccactttccctgaatattccagccgtgctgagcctagtccctttgtgagatttgtcaccatttcttggacaccatatgagagacttcagaggctgnnnnnnnnnnnnnnnnnnnnnnnnnnnnnnnnnnnnnnnnnnnnnnnnnnnnnnnnngtataaaaatgcaataacagatataacaaaaactctccttgtgccctactccctcatccctgaagcatgtatactaaatgcagagtagcattacttcagggatgagggagtagggctactctgcatttagtatacatgcttccagacttttccccatttacctacatacatatttacata

SEQ ID NO: 1279 - DNA, 435 bp, homo sapiens
gctttttttagaccgtcaggaagtttcaatctttaccctagtaagtcaacatgtgtttaatttttggaaagatgaaccttttctcagattattttaagcccttgttctttttatcctttagcatttcaataggtgaagcaccataccggctttatcttttggagagcttgaatcctcccatgaactggagagtccctccgggtttccctaggagtccatatttagttttgggttttgagatgatccatgaggaagcttgatttagtttttgaggagggaatcattacagatatctacccagctcactaattcacatgatcttatttaatgtggagaacttaatttattctaaactttccagctgtgaaactgatgcttttaaaagtttttgtaagggaagaaagaaagacttcactgcaatgtctgtttgataca

SEQ ID NO: 1280 - DNA, 504 bp, homo sapiens
  misc_feature (460)..(460): n=unknown
gtacaaactatattccaattgaacaagtaaagctaaaacattatcccacagaatataggaagaattgggcaatgtcaagtaatacagataaattctgctacacagtggctcagaatgttaaaaccaagacaaattatattttaacatgccttgcattaactataaaaaattgcaaacatcaacctaatgactcttaagatttagaatataaaatacatttctattttcccttccccatttgaagagaattaaaatttcaattttttcattctttttactccacttacaaagttattaccaataagcaagaaattacattccttttatttctaaatacttcagttatgactgagaattctatttcacaatatcaattcattcatgtatttattgaccatttatctacattcaaagcattatatgaatgcagaccaaccaactcaatcctgatttctgaagntaaatactacgaataattgctaaaggcagacttttctcaagact

SEQ ID NO: 1281 - DNA, 439 bp, homo sapiens
gtgttggactctagaagaacggcctttacttggaagcctgcgtcacatggctccaattcgaaagaggcgactgataacgttcaatgaagcggacgaaagtgtgaactataagactggtcctaagccagttagatttttgggcccttccacaagtacccaaattaaagtcaagaactcggcctcagtcacggtgtctccagccagtgccatccagacgtcggctggggcgacacaaaccggtttcaaagtggtagccgcagaaaggcagctcagcgctctgcaccttccagagccacggtcctggtgggcacgggggcacctgggcatcctcaggcttcccctggggctgcgagcgctgaaaatggaggcacgcacttacctccagctaaggtgctactctccgacaagaagcctacaccccagcgggtgataaagctga

SEQ ID NO: 1282 - DNA, 442 bp, homo sapiens
  misc_feature (356)..(425): n=unknown
tatacttactttactctttcaaagcaatgaaagtacaatgataagcatttgaataaaaagtaccctgttttatgagcttattttttaacatagtgaaggcatactctcactgaaagtagaaatatgtgatccaattacaaaacataacatttacgaataaacacacacaactgaatagtcatgaaaaaatagaggattagtcaaaatattctgtttaaaaatattaaattcaagttacatggaaattttatgcataaaaatcatattgtataatcagaatgaatcttcagtggtcatttctgaaaaacaaatactaactttagttaaaaagttaaacttttacttctctttttcanngtattttcaaaacttcactattcaaattaaataggatantntaatnatttacttcaaagatantatanaattctgatcccaagag

SEQ ID NO: 1283 - DNA, 302 bp, homo sapiens
  misc_feature (262)..(262): n=unknown
tgataggattgttaataagaaattggtttataaaaccattgttttgaactcacaatataactcctcttagaagaaacattgcacaggctttggtccttgggctggcaggaaaagtccatttggtgtgtaatcctaaaattctgcattgctatagagcaagagcacttatgctgaaatccatgagctctttgaaattgtgtaaaatttggagagcttttacatctctcatttcactgtgtatctgattttcaaagagaaaaantgttaaaaaggatagaaaacacaagcttagaacagtcact

SEQ ID NO: 1284 - DNA, 251 bp, homo sapiens
gtgcgcttcccagggatcttgagagtgaagatctcgaaggatttcatagttaagttgcttttacagagttaacaggtctccaagaaattttaaaaaaggtcattattgctgtggtttgagctcagcatggctgtagtcatccgtttactggggcttccttttattgcggggcctgtggatattcgtcacttcttcacgggattgactattcctgatggaggagtgcatataattggaggggaaattgagga

SEQ ID NO: 1285 - DNA, 174 bp, homo sapiens
  misc_feature (162)..(162): n=unknown
ggttcccaaaattctgatggggtcaaagttctgagactgagatcagagttcctccagtgctctgttcttgagcaacctagagactcctggatattctgtcttgtacccctcagaccatccaacggcgactaaatgagattgaggctgccttgagggagctanaggccgagggcg

SEQ ID NO: 1286 - DNA, 179 bp, homo sapiens
atttgttcaagtaaatgagaggagaatctgctgcatggacaaagcctcagtccttccttaaaatgttgactgctaccttgatttacaattcgtaccttccctactttgctgcatttttccttttcagcacctccccccacttttaaaaaactaatttgctcttctctgggctttcccct

SEQ ID NO: 1287 - DNA, 90 bp, homo sapiens
cggttgattccatcaattccatcgtttacgtttgctattgtgaagggtgcttggttttttcaaaattggcttcctcagatatttgcaaaa

SEQ ID NO: 1288 - DNA, 433 bp, homo sapiens
gtttctcggatgaactttatgtggacgtgacttacatagttcagccagaccctcctttggagctggctgtggaagtaaaacagccagaagacagaaaaccctacctgtggattaaatggtctccacctaccctgattgacttaaaaactggttggttcacgctcctgtatgaaattcgattaaaacccgagaaagcagctgagtgggagatccattttgctgggcagcaaacagagtttaagattctcagcctacatccaggacagaaataccttgtccaggttcgctgcaaaccagaccatggatactggagtgcatggagtccagcgaccttcattcagatacctagtgacttcaccatgaatgatacaaccgtgtggatctctgtggctgtcctttctgctgtcatctgtttgattattgtctgggcagt

SEQ ID NO: 1289 - DNA, 214 bp, homo sapiens
gcccaagctaggaagtggtggagttagaatttgatgtcagcacccagctgaccatggcttaaacagatgaggctttgttcaaaggctgtcttttcagtggctcagctgtgtcacagtcgatgttttctgcaatctctcaacctttccattgtggtcatgaggagactcctatggctccagccattgcatccacagtgaagactgaaagaagggg

SEQ ID NO: 1290 - DNA, 486 bp, homo sapiens
  misc_feature (110)..(112): n=unknown
  misc_feature (311)..(421): n=unknown
cattacttttatgaacagaaaaaaacatgtcttttccctagttaacagtaatttccacggaggagtttcttatctgtttcaaaatatctacaaggaaatcagtaggaatngnggcttagaaaatgtcaactgaaatgagaaacagaaaatatgcaaagatctgaaacacttctggtcccaagcatttcgataaggaatattcaagctgtatatagagtcttcatttttaatgaatttttatgatcaccattccaccataaatgacttagccagttccccatggtggacatggaggttctttccaaattttnacttttaaaatcaatagcataatganaaccatgtagcctgcacacatatnaatatatatgtaggattcattcccagcaggtttggtgagacaaagggtttatgtatttgnaatttagtgactgataaactgcccttcatagaagatgtataagaaccttcccacaccccctttga

SEQ ID NO: 1291 - DNA, 379 bp, homo sapiens
  misc_feature (2)..(2): n=unknown
  misc_feature (304)..(361): n=unknown
gngtggggaaggtagaactatgtcataactcttaggagtgagtggggaaggtagaactatgtcataactcttaggagtgagtggggaaggtagaactatgtcataagccttaggagtgagtgagaaaggtagaactatgtcataacccttaggagtgagtggggaaggtagaactatgtcataacccttaggagtgagtgaggaaggtagaactatgtcataacccttaggagtgagtggggaaggtagaactatgtcataactcttaggagtgagtggggaaaggtagaactatgtcataagncttaggagtgagtggggaaggtagaactatgtcttaactcttaggagtgagtggganaaggtaagaacctatgtc

SEQ ID NO: 1292 - DNA, 250 bp, homo sapiens
gcagaaaataaatcataaacaaacaaatgtaaaataatttcagatagcaataagtgctgtcggggaaacagaacaaggtgatgtgatagatttggattgagtggctagtttagagtaggaagttagaaaaagcctttctgagaaggcaacattgagctaagatttaaatgatcaaacaccagctatgtaaaaatctgcgaaagtcaatctggagggagggaatggttggagtttggtgagtttgaggact

SEQ ID NO: 1293 - DNA, 344 bp, homo sapiens
  misc_feature (36)..(86): n=unknown
  misc_feature (218)..(336): n=unknown
ggagaatctaggactgggtcagtcctatgaccatangactcctgattctggccaattctcattatgcatgatgtctgcaaagtcanatctgagtgaggacttccaatataaattgtgtaagaagtaagaaaggagaaagggcagctgaagggagatgggcacttcatccttctgctgcccactaccctgaacctgtctgcccctgtcctcgtgagcanggctggatgtgaacagaggactagntgaggtgacttccagacaccctctggttctgtgatttgataaattctgcctgaagtccaggcnctgtgccacccttctgggnagcaggagttngcaggggg

SEQ ID NO: 1294 - DNA, 416 bp, homo sapiens
  misc_feature (130)..(130): n=unknown
gacctcccagctgaaggcagggaagggcctgaccatcgtgggctctgtccttgagggcacctttctggaaaatcatccacaggcccagcgggcagaagagtctatcaggcgcctgatggaggcagagaangtgaagggcttctgccaggtggtgatctcctccaacttgcgtgatggcgtgtcccatctgatccagtccgggggcctcggggggctgcagcacaacactgtgcttgttggctggccccgcaactggcgccagaaggaagatcatcagacgtggaggaacttcattgagctggtccgggaaaccacagctggccacttagccctgctggtcaccaagaacgtttccatgtttcctgggaacctgagcgttctctgagggcagcatcgacgttttgtggattgtgcac

SEQ ID NO: 1295 - DNA, 414 bp, homo sapiens
taccaatataattaattctgctgctgaatttggttcatattgaatgtggtaacccttatatgtggatatattcaaacatgtggattgatttagatcatccgttttgtctttgttttttaggactttgctatttcaatattaaagatgtcttttgaatactgtagcagcagtagaatccctatgttcttgaaaatgcaaaatgtaacatgagttgcacatagactctctagcagtagaaatggaatattctaagtgcagaagtttggttttagaatctgttaaggaaggacggcccaatctttgaaaaggtacagctttctcaactttgaacatctgggggaactcttcttggaagtctgaattttaatatctttaatccaatggctctaaattaaccaaacattaaaaaatgga

SEQ ID NO: 1296 - DNA, 468 bp, homo sapiens
  misc_feature (32)..(32): n=unknown
cattaagtgtactgtacataaatgtattatanggaggggcaataagccaataaataacatcgctttaaacactataaagtccagtttatagcgaattattttctacagtacaaaacgaatacagaaaacacatttggaaagatcacagtgtttagaacattgtaacagcagttgtaaaaaccataaagtgcatctctaagcttctgactctatcttgcttatagagatttcattataccatgcagtgggctgtgagcaaactcccacatgaaagggaagcaatatcaactgactagtactatcccctgcagaacaaccaataacaaaagctaaattctgatgagcatttgcaagttgatccttcttagtctgcacaccagctaacttgctccagtgatcacgtctttctgtattatcatttgccattttgtccttgaaaataatatatatcttatagcttatgattgc

SEQ ID NO: 1297 - DNA, 437 bp, homo sapiens
  misc_feature (201)..(356): n=unknown
ctttcccatctcttcatggctgatttctcagggacatacagaggaaccagtggaagctggctttgatgtgagaggtgtatactcacacctattacattcaccttaggataagtaggtcagaaccatttcctcactttgattattcagttgcagagaaagggagatttttttctccacccccatgatatttcagagtcattnnnnnnnnnnnnnnnnnnnnnnnnnnnnnnnnnnnnnnnnnnnnnnnnnnnnnnnnnnnnnnnnnnnnnnnnnnnnnnnnnnnnnnnnnnnnnnnnnnnnnnnnnnnnnnnnnnnnnnnnnnnnnnnnnnnnnnnnnnnnnnnnnnnnnnnnnnnnccattgacagtgatttaaccattgatgactagactgataagactgaagtcttgaatacagacccagttaagtttactttag

SEQ ID NO: 1298 - DNA, 389 bp, homo sapiens
  misc_feature (68)..(91): n=unknown
  misc_feature (293)..(338): n=unknown
cacctgtgctcagaaccggctctgtcctccgctggcttgtgggctctctgtgcctgggggttctctgnaaaatgaggtattagttgtatcnatctcatgggattagtaggtggattaaaccagttaatacaggtaagtacttaatgaatgtgtccttcgttttgaacgtattgattggtttctctctattgttttctataggggacaagctatgggaggtacagtgtgagtctccgaccttcacagtggcgtggcaccccaaaaggcctctgctggcatttgcctgtgatgtnaaagacggcaaatatgacagcagccgggaagccggaactgtgaantgtttgggcttcctaatgattcttgagaggaggttgtagggagatgatgcc

SEQ ID NO: 1299 - DNA, 223 bp, homo sapiens
  misc_feature (45)..(67): n=unknown
aaattatatatatatttttttaattatttaaaaaaacttccatgnncttccattcccctccctccanactaggtattgtccaagttgtatcaaatgccacaaagtctaccatgcacccagaagcagagaagacaggaggtccagaggacaaggtatgctggggtcactactcgcactgcagagtccacgcgagttaactcatgctgggggcaaagaatggaaa

SEQ ID NO: 1300 - DNA, 384 bp, homo sapiens
  misc_feature (46)..(46): n=unknown
gacggcatcccctgtgggtgccagcatctgtgctgcgaatgtggancactgcagttctttgacttttcttttcccagaaatgggattcccctcctgcttctgagccagtccaagacatgctggctgctttatttactgctccctttgtgcctcagaagttccctgttgaatagtgttctgtctttggtgctctacctgacatgtggttaactacttgcttttttggtcctttgttgtgcaggagttgagtgccaggctcacggttttttgattaccatagttttgtagtttttgaaattcagaagtgtgagacctccaactttttctttttcaagattattttggctgttgagtcaattatgattccatatgcattttagatgg

SEQ ID NO: 1301 - DNA, 319 bp, homo sapiens
  misc_feature (54)..(146): n=unknown
ccatcttcaaattagaaactgggccctcagacaccaaacctgctagtgccttgnnnnnnnnnnnnnnnnnnnnnnnnnnnnnnnnnnnnnnnnnnnnnnnnnnnnnnnnnnnnnnnnnnnnnnnnnnnnnnnnnnnnnnnnnnnnncagacttagacactgtatgattccattactggaactctagaaaagcaattctaatctttctaaaaagataggaaagagtcattgtttggagccagcaaaggggaaaggattgattgggatgggacacataggaaattgccggtgtgatagaaatgttttgtctctatctatga

SEQ ID NO: 1302 - DNA, 384 bp, homo sapiens
  misc_feature (6)..(371): n=unknown
tctgtnatggacgtggccactgtnagtgtngccgctgccactgccaccagcagtcgctctacacggacaccatctgcnagatcaactactcggcgatccacccggncctctgcnaggacctacgctcctgcgtgcagtgccaggcgtggggnaccngnganaagaaggggngcacgtgtgaggnatgcaacttcaaggtcaagatggtggacgagcttaaganagccgaggaggtggnggngcgctgctccttccgggacgaggatgacgactgcacctacagctacaccatgnaaggtgacggcgcccctgggcccaacagcactgtcctggtgcacaagaagaaggactgccctccgggtncttctggnggtcatccccctg

SEQ ID NO: 1303 - DNA, 125 bp, homo sapiens
  misc_feature (6)..(110): n=unknown
ttgttntcttcntcactggagtctgtttcagantcngagtcnctgtcgctntcttcnnnntncttcttntgttttcttttcgntgnttttttctttctccttttcttggncctttcttttgaacg

SEQ ID NO: 1304 - DNA, 507 bp, homo sapiens
  misc_feature (72)..(72): n=unknown
  misc_feature (215)..(215): n=unknown
  misc_feature (451)..(451): n=unknown
gcggccccctctaacgggcggcgggggcgctggccccctccctgcgccacatctgtcccgcaccgggcgcanagctgattcatctgcagccaggtccgggaaggaactgtgctcccggcagttgcagggcagcgtccgggcgggtggcttgtccccaggaccgcgctccccccgagccgttttaggtattgttgcagcatctggcagtgagactnaggatgaggacagcatggacattcccttggacctttcttcatccgctggctcaggcaagagaaggagaaggggcaacctacccaaggagtctgtgcagattcttcgggattggctgtatgagcaccgttacaatgcctatccttcagagcaagaaaaagcgttgctgtcccagcaaacacacctgtctacgctacaggtctgtaatggttcatcaacgcccgccgcagtccctccntgaacatgctgagaaaagatggaagatccaaatcattcacaatttcccgcgtgggg

SEQ ID NO: 1305 - DNA, 496 bp, homo sapiens
  misc_feature (67)..(85): n=unknown
gaggcatgtgagtaaggttaatttgccagtcctgggcaggtgcaaatccccgagcttgatgagtagnnaangnagggggcctgancaatccctgaggagtagtagaatagcagatggaacactgaaaattgatttccttgaggatagatttccatgatggaaaggaaatgagaggttctaagagacgggctagcggcttataacctacatggaagaggctatgaaatgacgacagaatagaatgggcctgtcagcctggaaggagatattttccttggtctaagaaccatttgccttgtgtgggaagagattaataagtggaagtttcagtaggggagtaggtgggagtgaccaatgagaaggagaaaaactggctgtgagggacagaagttggaatgctagtggcttttttagctaccttatcagcataagtgttgccctaagcaatgggatctgacgccttttgacagcccttgcagtgaatgactccagcttc

SEQ ID NO: 1306 - DNA, 363 bp, homo sapiens
  misc_feature (18)..(18): n=unknown
  misc_feature (165)..(165): n=unknown
  misc_feature (318)..(330): n=unknown
cgctgagcagcgagccgngccagtcccagcgaacgcacatcaagacggagcagctgagccctagccactacagcgagcagcagcagcactcgccccaacagatcgcctacagccccttcaacctcccacactacagcccctcctacccgcccatcacccgctcanagtacgactacaccgaccaccagaactccagctcctactacagccacgcggcaggccagggcaccggcctctactccaccttcacctacatgaaccccgctcagcgccccatgtacacccccatcgcgacactctggggtccttccatcccgnagacncacagcnccagactgggaaaaccgtctacacacagtcatc

SEQ ID NO: 1307 - DNA, 429 bp, homo sapiens
cacactgttcaactaagagtagtttagctgttggaaaaataagagcatttaattttatctaaaaatatgtataaatcccctcaaaatggtaatgaatcatacacagtacatactaaaaatatttaaaatagagaatattcctcacagaggacttttttctttaattactgctaaaaaaataattacaaagtccaaacaggcagagagatttagcacactgatcacacgattctccatcatcctccacgcttgctctgaagagggtttaaaaagtccagtttctcgttgatttcgctgctccatttagccaaggttggcctggccactgattggccacaagtgggtaatgcgcttggataggtcatgtttgtgtcttggaaatttgggtacgagttgcctttagcttaaatgtctttaaggaagaagaag

SEQ ID NO: 1308 - DNA, 441 bp, homo sapiens
cagcgtctctgtgacttggcaggacccagctccactgaatcagagtccagaaaaagatcaatttcaaaaagaaagtctcatctggatctcctcaaactcatcatggatggcatgaccgaagcatgcatcaagggtggcatcgaagcttgctatgcagccgtgtcctgtgtctgcaccttgctgggtgccctggatgagctcagccaggggaagggcttgagcgaaggtcaggtgcaactgccgcttctgcgccttgaggagctgaaggatggggctgagtggagccgagattccatggagatcaatgaggctgacttccgctggcagcggcgagtgctgtcctcagaacacacgccgtgggagtcagggaacgagaggagccttgacatcagcatcagtgtcaccacagacacagggccagaaccactcttcgagggagag

SEQ ID NO: 1309 - DNA, 283 bp, homo sapiens
  misc_feature (2)..(238): n=unknown
anccgctgtanctgtgcaatgccagtgatgacgacaatctggagcctggattcatcagcatcgtcaagctggagagtcctcgangggccccccgcccctgcctgtcannggctancaangctcggatggcgggtgagcnangagccantgctgtcctctttgacatcactgaggatngagctgctgctgagcaactgcagcagccgctggggctgacctggccantggtgttgatctngggtaatgacgctgagaaactgatggagttttgtgtacaaagaac

SEQ ID NO: 1310 - DNA, 202 bp, homo sapiens
agtgcctgattcaagcgtctgtctggttcagatataaatacccatgtgggtacctaggtgctagtctccccactaactgagggaaaaaggttcccaggtggggtcctctgcccactttgccaccacattcacattccaaatgggataatgcctgaggggccaagagtggtcaggctgccctggggtgaatgtcaccctgatg

SEQ ID NO: 1311 - DNA, 419 bp, homo sapiens
  misc_feature (2)..(416): n=unknown
gntncangcggcaccacactcagtccattaagtacaaagaggagaacctggtgagtgangcgggacttagggacatgtgctgngagggactcaggtgggagtcggagtggaaggncctcccaggctctgccacaggccctgnactgcaatgagctctgggagggcctcaggagccccgcttgcttattcttgctcacacttggcaccatcttnaaaaaaaacagtttcctggtggattgtttcaagatttgagacagttactggtgctaagtaaagaaatttgggttganagcagccctttctctttgccgcccacagcttcacaggggaggggagcttctgtggcttggttccaggcctgggtcctcctctgatctgctgtgtgaccgcatttanagtcacttcccctctttctnagt

SEQ ID NO: 1312 - DNA, 212 bp, homo sapiens
cctcagacctcttcataggactcacagtccactaaccacgtgatgggtgatcgtgggttcccatgtctcctcctccctggtcctcagacctcttcataggactcacagtccactaaccacgtgatgggtgatcgtgggttcccatgtctcctcctccctggtcctcagacctcttcgtaggactcacagtccacttagcctcccgtcctcca

SEQ ID NO: 1313 - DNA, 373 bp, homo sapiens
  misc_feature (333)..(333): n=unknown
attagtacaattagcttcagagttgatattaatagaaattattccaaaattattcttgtcacaagtaactactatatcccacataaaaagggaaaaaatcccacccaatcacagaaaaggcatcctctgtatgtttccgtggcaatgcgttgtttatgtattctcaaattttgtctggctagttatccaccgcttctccaatggattcattcagtttcttggagaaccatatagactaatgacagcatctgggacacacggacgtatcaagttcatggtggacattcctattataaaaaatactcaggtcttgagaattcctgtgctgaaggntcccaaaatgctttctaaaaagcattagtcatgcctcaaa

SEQ ID NO: 1314 - DNA, 537 bp, homo sapiens
  misc_feature (114)..(136): n=unknown
  misc_feature (482)..(482): n=unknown
ctcttttcttatgttgcctcttctccaatttctctattctcacctcttggaattgccaacagatggaaggtagatctgtcctctatgtctcctaacttttctttttttaaccannnnnnnnnnnnnnnnnnnnnnntgcattctggggaaatccttggcccaggttccactcataattctttcttcaacgatattctttcagtggtgtcctaacagtctgatcagtcttatagttcaataaataaatttttaatttccagcttcccaaagtttcatttccaggactcaaggttcattttagatacatccaaatgttttgaagtctatgtaaaatatgtgtgtgatacaagtatagattccaacaatcacacagagctctgttcagatcttgtttctctgccattaactgtgttgtggcggttacctgattcctctgagcttcaattttctagcaaaattgtggtaaaaatgttatactgccntattgtggagggatgaaatcccataattgtaataatattacctaactagctaact

SEQ ID NO: 1315 - DNA, 403 bp, homo sapiens
ggggaggagaggagaggagaggagagaaaaggagaggagagaggagaggagaggaaaaggtgtgtaggctccacccaaagcatggccaggtttacccctggagggaaagtcacaagctcatgtccagaaggccagtagcagcaagctgctctccagcccagatttcctatcctgtgtacctggagcttgtttctcagattctaactctcacaactgaagcctctgttgtctgattactatctgagaattctacacaattttaccctcgataaaagcagtaatttcttcttcatctttcccagatcaactcttgtagtagatcaacatttctgggaccttcttttgcatggttaaaacatcacagctgaatcttagcaacaggaaggtttgtttttatgtttca

SEQ ID NO: 1316 - DNA, 597 bp, homo sapiens
  misc_feature (189)..(189): n=unknown
  misc_feature (584)..(593): n=unknown
gttgaaatctctggtgttctggggcacagctttcttgaagaccaaagtagaaatccttagaataactcattctccacttagagttccatctcttgaatccacctttagaacaatgggtttttctggttgaagaagtccttgcgtgtctaatttcaaggggatctgtgtttctttacaaggtttgaaggngaagttctgaaggactctgattagagcaagtttcatgttcatgagagcaaacctcatgccaatgcagtttctgggtccagttccaaagggtgtgtatatgtaaggatctatgctgtccttcttcttactgaacctttcagggcggaactcctcaggctctgtccagtactttgggtcatggtgaagagcataagttggaatcacgaccattgaccctttgggaatgaataccccattgatttcaacatctttcttgcaagtcctctcaagtctaatagcaactgggaataatctgagtgtttcattcaccaccatgtcaaggtactccatctgtaccacggcatcataggtaggtggtgccttattggggcaaaactgcatcaatctccttttgnagtttctgnctgg

SEQ ID NO: 1317 - DNA, 427 bp, homo sapiens
  misc_feature (424)..(424): n=unknown
ccaaggcgcctggcagtccgcctcggggcccaggccctcctgggggctgccaagatgctgctgcactcagaacagcacccaggccagctcaaggacaacgtcagctctcctggtggggccaccatccatgccttgcatgtgctggagagtgggggttccgctccctgctcatcaacgctgtggaggcctcctgcatccgcacacgggagctgcagtccatggctgaccaggagcaggtgtcaccagccgccatcaagaagaccatcctggacaaggtgaagctggactcccctgcagggaccgctctgtcgccttctggccacaccaagctgctcccccgcagcctggccccagcgggcaaggattgacacgtccttgccttgaccaaccatccttgccaaccaactttcttctttctctttgntca

SEQ ID NO: 1318 - DNA, 362 bp, homo sapiens
  misc_feature (5)..(5): n=unknown
  misc_feature (334)..(357): n=unknown
ccccnacaacaaaaaagaatgttttggtattggagaagggatggtcagttagcctgtctgtcacacgacggaatggatactgggcccggggaccactttcatactcacgtcctcatccttggatacccaggggagggcgaaccgttttcgctcgtgtgtctgtacgcagcatgttgggatcgggagtttcggcacagactatcccatcaagccgttggctcctttcagctactacgttaccacgttcctaaaacgcaagctctccggaccagacggacacagggagaagctagtttctttcatgtgattgaaatgatgactctactcctaaaanggaaaaaacaatatccttgtttncagaa

SEQ ID NO: 1319 - DNA, 84 bp, homo sapiens
  misc_feature (4)..(83): n=unknown
ttcnaatactcncttatttctncnctantatgggtaantagctggaaantgtanagttcgcatccncttaacaatgaagagana

SEQ ID NO: 1320 - DNA, 433 bp, homo sapiens
atttcacttcagatgtttatgtttttgttttttttgtctccaatgatggtaaaaataaaaactacgcattacttaaaggagtttccctcacatgtaaacactgttaggaagtctggattaagttgaaagtcctgttttaactttttttctctcatataccaaacactctgtatttctcttaaagaagccctttaagagaaagccctaattttatatctgacagtaaagtttgctgcaagtgtatgagttcaaacacatcccttgttttctgtccctaggggaaaagtcatgtagttttagcttggctccagtgttaatattatattcagtagcagccttagaagagtggtctaagacttgaacctggagcaattttatagcacagaatcctacgaagatagggctgtggacatttgttttctttttcgtgtgt

SEQ ID NO: 1321 - DNA, 541 bp, homo sapiens
  misc_feature (176)..(200): n=unknown
ttttgaaaatatgaaaaataaatcacatctccccaaaatcatctaagagacatatttacacaagttctgaccatgctaaaaaattcatgaatgtgatggtgtataaagcatttggtacatgatgatacttgctttccagaagctggcatttgcatattataaaacgttaagaaganggnncttngacctcggaatgtacnagacaatagttttatgtttcttctcaatatacagtgacctggaaggactccctgttgttaaaacctgcttccccactgctcagcctgccatcagccatccagctgcagagcagtggagagtaggtctcaccagtttttgtgcagatgcttctaacccagagtccttctgcttacttcattggacaatattgccctttctaagaaaacccttttagatcctgtactccacttagcaaatgccctgccagcaaagtcacagatgacttttttacccaatcttaggtaaatctggattatctgcccaaccgtgcaagtcaataagccacccttgaaaactgtgt

SEQ ID NO: 1322 - DNA, 562 bp, homo sapiens
  misc_feature (507)..(528): n=unknown
acacagggtgtgagagaaagacaggagtcaggggcactccagggcttttgaccactggacagtggcactgccctcagctgagatgggcagagttgcagtagacagagccgacttggaggatctacggagtgccgcattacaggtggcgctgggagtttcttttatgtccaaacataggtgcaggtgggcagtaaaatgcaggaggcccaaggacagggcagaggcccaggcgggaggtaaatttggtgtgatattgtgtttaaagccatgagactgaatgcgatcaatgagaggaaagacacgttgggtttgggccctgggcaccccagtttctggaggttgaggtaatgaagatggcagagcaggcgctgccgggtgttctggaactggggagaaaccgagctgcgtttctccctgcagagagtggccagctccgacacatttgtcccatgtgtcagtggggtcttgtttcaacttgatgtttatctgttttctttgtagaatgangagaacctgtgcaaatgatgnttaagcaatctactttttaagaagacctatatta

SEQ ID NO: 1323 - DNA, 442 bp, homo sapiens
atcggatctggctataatacccctgctgacatttggagcacggcatgcatggcctttgaactggccacaggtgactatttgtttgaacctcattcaggggaagagtacactcgagatgaagatcacattgcattgatcatagaacttctggggaaggtgcctcgcaagctcattgtggcaggaaaatattccaaggaatttttcaccaaaaaaggtgacctgaaacatatcacgaagctgaaaccttggggcctttttgaggttctagtggagaagtatgagtggtctcaggaagaggcagctggcttcacagatttcttactgcccatgttggagctgatccctgagaagagagccatgccgccgagtgtctccggcacccttggcttaactcctaagcccctggccagcaaccacagcagagattacacacttgaccctc

SEQ ID NO: 1324 - DNA, 416 bp, homo sapiens
  misc_feature (380)..(398): n=unknown
gcgaacctacagcagctcccttcaaacgctccagccccaggaccatctcctttcggatgaaacccaagaaagaaaactcggaaacaaccctaactcgcagtgccagcatgaagctcccagacaacacagtgaagttgggagagaagctggagagataccacacggccatacggagatcagaatctgtcaagtctcggggtctgccttgcactgagttattcgtggctcctgtgggtgtagccagcaagcgccacctctttgagaaggaactggcgggccagagccgagcagaaccagcctccagccggaaggagaacttgaggctctcaggggttgtgacatcaaggctcaacctgtggatcagcaggacccaggaatcnggagatcaggacccccangaggcacagaaagcatca

SEQ ID NO: 1325 - DNA, 429 bp, homo sapiens
  misc_feature (180)..(425): n=unknown
acaggtttttcagagaaagggtaagtggttgcacacaaaaaggcacttagctcctggccatggcagccggccagggaagggaggggagaaccaagcagggagacggggcacagggaagacgcacggcagctccttctcccctggccagagcgggcctcagtggctgggagcaggccccanggacaaagatgggtgggtccaggcctcanagaagggggacatcatagacaaagaggcacttgctgggagccgatgagacaggtgactctggagttcttgaggggcgccgtgccctgactgtngatgtgagcaggaaggagcagangtctctgggcaggacataggccccatagtgctgatgtgcacntgtgctgtgacctgggcagagactgggtcccagcaatctattgtgcctgccgcagggntgag

SEQ ID NO: 1326 - DNA, 379 bp, homo sapiens
ccaaagccctggaaactaagtttctcttatggacgggccctgcaggccagtgcactggctgcctggggtggcaaggctgcaaacaaggaggcaacccaggaggcttttatgaagcgggccatggctaactgccaggcggccaaaggacagtatgttcacacgggttcttctggggctgcttccacccagtcgctcttcacagcctgctatacctactagggtccaatgcccgccagcctagctccagtgcttctagtaggagggctgaaagggagcaacttttcctctaatcctggaaattcgacacaattagatttgaactgctggaaatacaacacatgttaaatcttaagtacaagggggaaaaaataaatcagtt

SEQ ID NO: 1327 - DNA, 360 bp, homo sapiens
  misc_feature (356)..(356): n=unknown
agccgctgcaccctgccccagtacaatcttttttgaactcaaatttttgctgacatctgagtgcacacaccacagtgtaaattatgccttatcagaatctaaatgaaaatagcgaacatttaaaagctatcaccattgtagtagaatcatccttcttttttgaaatttgaagcatcccaggcttaaaatcttgtgtttcagaaagacagtttataccatgactgcttaattatccccccaaagaccttctgattgaagtcatgtacagttcagtggctaaattctctgcctttttaacttgctttgcaagcctactctgaaaataagttattagtcaagttattctcaaagatgtnccag

SEQ ID NO: 1328 - DNA, 434 bp, homo sapiens
cttttcttctcaccctgtcctcctaggcagcaatcagcatctttggcatggttgggggaccgctgctgggactcttctgccttggaatgttctttccatgtgctaaccctcctgtgagtgatgcatctggatccacagtcatgtgtagcaggatggacctgggggttggcagggctgtcaccaggagagctgaggactgccgtgagggctggcaggactggccttgtgacaggcctgcactgtgtctcggcagggtgctgttgtgggcctgttggctgggctcgtcatggccttctggattggcatcgggagcatcgtgaccagcatgggctccagcatgccacccttctccctctaatgggtccaagcttctccctgcccaccaatctaaccgttgccactgtgaccaacactgatgcccttgactaacttct

SEQ ID NO: 1329 - DNA, 431 bp, homo sapiens
  misc_feature (27)..(34): n=unknown
gataatgtggagaagaaactccaaaangaaacanagcacggatgacagaaatgacaccacggcagcctggctcaggagtcaggtagatagatggctgctccacagtggacctggtcatggccctggtttcttggatccacatttgccccgtctcttaagtgtccatctcagaggtggaggatggagacagtgaggtggaaaacgtgcttgctctacacaaagacaaatggatcttctattcccagaggaccagggacaccaaaacctccctcttcagaatggaggtagacagataaaaatgagaggggcttgagtgtcacagacaatctgaaagtaataataggggctcactgtggctggcagaactggtactgaaatggggactacaggggaagcagcttccagttttatggtggagagtcagtcctgaa

SEQ ID NO: 1330 - DNA, 391 bp, homo sapiens
  misc_feature (4)..(53): n=unknown
  misc_feature (259)..(351): n=unknown
ggancccctctgtgaaggctcagcagaggtgggatcccacgcnccctcccggnccctccctgccctccattcagggagaaacctctccttcccgtgtgagaagggccagagggtccaggcatcccaagtccagcgtgaagggccacagcccctcttggctgccaagcacgcagatcccatggacatttggggaaagggctccttgggctgctggtgaacttctgtggccaccacctcctgctcctgacctccctggganggtgctatcagttctgtcctggccctttcagttttataagttggtttccagcccccagtgtcctgacttctgtctgccacatgaggagggangcctgctgtgtgggagggtggttactgtgggtggatagtg

SEQ ID NO: 1331 - DNA, 327 bp, homo sapiens
aggaagttctgttatctccaagctcttcagaaaacgagatttctgatgatgactcatatgtcagtgacataagtgataatctttccttagataatctcagtaatgatttagataatgagagacagaccttggggcctgtccttgatagtggtcgggaagcgaagtcccggagaagaacgtgcctgccggcgccctgcccgagcagcagtaacatcagcctgtggaacatcctgaggaacaacatcgggaaggacctgtccaaggtgggccatgcccggtggagctgaacgagcccctgaacacgctgcagagggtctgcgaggagct

SEQ ID NO: 1332 - DNA, 509 bp, homo sapiens
gaaatgtcaaggtgttctacattcatataaacaatcagggtaacatttgaaattgtaaagaaacgcactgaggaaaatatagacttaaagagttacaatgctaagctaagcacaagtgatcatcctagagtatcttttaaatatataaacacaggtttgtgccacttcagaaggcaagcacaggagaaatacactaatgttatctttcttctttactttttcaccataagacaggatggtccagtttggaaaaaccaagatcttttctaagttccaaataggtgccgttgctcacccaagagtcatcgtcggatttcctgaaaaaccgaggctggtgctccacatgattttcttctaagacccgccgcctttctctctgcagttgttcaatcctctgctttgtatttcagcttcttctaagttcccttcctctagaaacctctgggtctggcctaaatcgagtggtcagtaggtggcaataaaagactttgatgatggatccatttcat

SEQ ID NO: 1333 - DNA, 500 bp, homo sapiens
  misc_feature (457)..(487): n=unknown
tgccaccctgcgctgctccttctcccccgagcctggcttcagcctggcacagctcaacctcatctggcagctgacagacaccaaacagctggtgcacagtttcaccgaaggccgggaccagggcagcgcctatgccaaccgcacggccctcttcccggacctgctggcacaaggcaatgcatccctgaggctgcagcgtgtgcgtgtggcggacgagggcagcttcacctgcttcgtgagcatccgggatttcggcagcgctgccgtcagcctgcaggtggccgctccctactcgaagcccagcatgaccctggagcccaacaaggacctgcggccaggggacacggtgaccatcacgtgctccagtaccggggctacctgaggctgaggtgttctggcaggatgggcaggtgtgcccctgactggcaacgtgaccacgtcgcagatgggcaacgancaaggttgtttgatgtgcacacgtcctgcnggtggtgtgggtg

SEQ ID NO: 1334 - DNA, 479 bp, homo sapiens
gaaagctaaagagatgttagagacacaagtggcccatctgtgttcacagcaatctaaacaagattcccgagggtctcctttgctaggtccagttgttccaggaccatctccaatcccttctgttactgaaaagaggttatcatctggccaaaataaagcttcaggcaagaggcaaagatccagtggaatatgggagaatggtagaggaccaacacctgctaccccagagagcttttctaaaaaaagcaagaaagcagtcatgagtggtattcaccctgcagaagacacggaaggtactgagtttgagccagagggacttccagaagttgtaaagaaagggtttgctgacatcccgacaggaaagactagcccatatatcctgcgaagaacaaccatggcaactcggaccagcccccgcctggctgcacagaagttagcgctattccccactgagtctcggcaaagaaaatctgcagagt

SEQ ID NO: 1335 - DNA, 614 bp, homo sapiens
  misc_feature (556)..(597): n=unknown
aaaaagctttatatacatagctttatactatttacattgcagtagaggaatggcaatgctaacaggtgatcagtgcttccaaactttttcaatacctacacatgggagatctaaagagtacaatatatttaagacttctaaggaattgttttctcctcactaataaagcatgccctgactaaagagaagtcctgtaggcacagccttatctattcaatgactggcacctcccaggggtactgacacacaaagtgccttcactggaccttacagttctcactgccgttggactccagtccagctttggggctggggacaagtcggcctcgcttgaccctcaggccctctctggggctgtcagtcggacttctctcaggaagattattgactgggacggatttcgtggtgggttctcggaggatggtgcctgaatctactgggctccgctgagcaactttgaccttttgtgatctgctgccaccagctgttggtttggaggactctgcaagattttctttgccgagactcagtgggggatagcgctaaactttctgtncaagccaaggcggggggctggtccgatttgccatgggttgntcttccgcagggatata

SEQ ID NO: 1336 - DNA, 385 bp, homo sapiens
  misc_feature (76)..(381): n=unknown
gttggagacttgggaaacccagggcctaaagagaagtatccatgagggtcaaacttcctgttgaacttcctatgtnctttctcaagtgctcagggatctaagtaagtggacagcaagcctgtagctacngngtggtgatgtncctctnccagctgtaccctcaacnaangngcttagtttccatgtagnatgcnatcanttggntcatgctcattcacacaaagggcacgtntntcancctggtatcagggaaattncgacttatttntgccctaaaacgtctccctagctgtncttcgtggggttttaatgtntgtattnatgcctaatttgcntttactggccaagccttgtggcaccagcaatctccaaagtcctgtngtgg

SEQ ID NO: 1337 - DNA, 384 bp, homo sapiens
tgtttgcccagtgccacgcatggtgcccccgcagcactactacgatgcctgcgtgttcgacagctgcttcatgccgggctcgagcctggagtgcgccagtctgcaggcctacgcagccctctgtgcccagcagaacatctgcctcgactggcggaaccacacgcatggggcctgcttggtggagtgcccatctcacagggagtaccaggcctgtggccctgcagaagagcccacgtgcaaatccagctcctcccagcagaacaacacagtcctggtggaaggctgcttctgtcctgagggcaccatgaactagctcctggctttgatgtctgcgtgaagacctgcggctgtgtgggactgacaatgtgcccagagaatttgggg

SEQ ID NO: 1338 - DNA, 367 bp, homo sapiens
  misc_feature (14)..(14): n=unknown
  misc_feature (246)..(246): n=unknown
gaacaaagactcangacaataaatatctgaagagaggaagccgagcttaggaggctcagagggtccgggggaggtaaagctgtcgagggcagtgaagggggctgtgcccaccccgctcacccgctccccagatgcctaggggagcgccgggcccggcgggaggtgccggtggggagcccgcagacggtgtcctggcactggcagctctcgatgtgggtgtaggtgtgtgtcagcgagccgccattngggcagctcaggaccacctcacgctggctggttttctcctctttgcagcaggagcagctgtggtccagggcctgggccttggccgagtacatgacaaatgtccgcaggacccggagcaatg

SEQ ID NO: 1339 - DNA, 385 bp, homo sapiens
  misc_feature (332)..(332): n=unknown
gaaggtggtgcggggagcgagctgattttcggaggctacgaccactcccatttctctgggagcctgaattgggtcccagtcaccaagcaagcttactggcagattgcactggataacatccaggtgggaggcactgttatgttctgctccgagggctgccaggccattgtggacacagggacttccctcatcactggcccctccgacaagattaagcagctgcaaaacgccattggggcagcccccgtggatggagaatatgctgtggagtgtgccaaccttaacgtcatgccggatgtcacttcaccattaacggagtcccctataccctnagcccaactgcctacaccctactggacttcgtggatggaatgcagttctgcag

SEQ ID NO: 1340 - DNA, 611 bp, homo sapiens
caagaactccaaacccacccagcagtcttaacattaccaatagagaggcaccagcattatctgcctcctgacaggatgcaacaagaagtacccagcaccacctaggaagtatttttgccacaaaatcagacctccagatctaactaccattttataggaaagataagttcagagaaccatgtcaaatgacacctcgggatttcaaccagcaacgttcaaatgtgctaaactctgtagatggaaagagacttacagacatttcaaataaatgcaatatatgggccttgcttgaatcctaatacaaacaatccaactacaaaaacagccaaacatttgtgggacaatgggagatgcttgaattccgattgtatatttaaggatgttagaaatatttatggacaaaatgatgtaatgctcggaatttgcttcagaatgatccaggtacagcatgtggagctggagagaggagtgggcagcagtgtagataaacaggcctggccgtgtgtggatgggttgtcagggctgagtggagttgcaaaggggtttattataccatgatctctgcttgtgcatatgtttggagatttcataatcaaatgtgaaaatttttg

SEQ ID NO: 1341 - DNA, 328 bp, homo sapiens
  misc_feature (48)..(163): n=unknown
  misc_feature (308)..(323): n=unknown
aaaaactacaccagtaggttgattcaatcaagatgtatgtagacctanaactacaccaataggctgattcaatcaagatctgtgctcncagtgggctgattcaatcaagatgtatgtntgctatgttctaagtccaccttctatcccattcatgttagatcgntgaaaccctgtatccctctgaaacactggaagagctagtaaattgtaaatgaagtaatactgtgttcctcttgactgttatttttcttagtagggggcctttggaaggcactgtgaatttgctattttgatgtagtgttacaagntggaaaattgattcntctgg

SEQ ID NO: 1342 - DNA, 538 bp, homo sapiens
tattaatcaaaggcacaaacgaaaactaagacttaaagttgaccataatattgacaagtcatatcaacctggtaccagctaaatttaatgaagataagttccactgaattcctaaggaaaatacaacaattccgacaccatttaataattagaaactttcaaacaagagggaaagtatgaacatcataataaatgcctcaatttggaggcaaagaaatgtaagttgtgtgctgaaacctgatgtatcacagaacatcagtagtcccttccagtcgtggatgccttagacccaaggccttacactgttatcaccatctggcaaccctgatgagggatgccatctattgactgactgaaattaaattacacaatgtgactctctgcctgtcagcagaacagagagtcataaaacattttaacttcttggtgcaaattatacaatcaaaccagataaccttgactgggaaggagccagttcagaggggtgaatttctatcacactacatcaatagcaaagtcagaggatcaattttccatc

SEQ ID NO: 1343 - DNA, 135 bp, homo sapiens
  misc_feature (70)..(135): n=unknown
gtttgactcccgtgcggtgcggcccagcagccacaaagctcccgctgccattgctccttgtactcccgcngtnactgccgctgtccaacccctcccccggggnttgcgcggcggctccnacanncctcggnccgn

SEQ ID NO: 1344 - DNA, 387 bp, homo sapiens
  misc_feature (99)..(99): n=unknown
actcattgcattttaatttttctctagatactcaaatagctaagcaaatgaaggtacatgccagtctttcttcttttatacacaacagacaaaagtgtnggggggctagacaccaaccagctatttttttcccctggaaccagatcatcatactgctgagttccttcaaaccatcaaagtacagccttccttccaatgttgcataatctgttcaaaatcacagtataaatacaaagttcttccatccattttacaaaaccagcaaaactctacaataaaatcctacaggaaaaagtagaccaatctcatttacaaacagcattttaacagtaattattaaatgttacaaaacataagataccaaatctaaatccttaaagtcacacg

SEQ ID NO: 1345 - DNA, 390 bp, homo sapiens
gaccgcgcagggagcacacaccgccagtctgtgcgctgagtcggagccagaggccgcggggacaccgggccatgcacgcccccaactgaagctgcatctcaaagccgaagattccagcagcccaggggatttcaaagagctcagactcagaggaacatctgcggagagacccccgaagccctctccagggcagtcctcatccagacgctccgctagtgcagacaggagcgcgcagtggccccggctcgccgcgccatggagcggatccccagcgcgcaaccaccccccgcctgcctgcccaaagcaccgggactggagcacggagacctaccagggatgtaccctgcccacatgtaccaagtgtacaagtcaagacgggggattaaagcg

SEQ ID NO: 1346 - DNA, 571 bp, homo sapiens
  misc_feature (452)..(535): n=unknown
cgaggaaggaaagcaaagcagcaggatcccctagagagtttagtctttggtttctaagtttaaaggggggattggcttcagagcttggagcaagacagaagagtcgacggacggatgagctggcaagggagaagggagtctctggggcatgagcaagggagccgagatcttgtctgggttcatgaagctagagagggctgcggcagaggcgttgaggcctgggtatagcactggcactgaggtgggataccagcacttctccagcatgggcaggtaggcagtcgctgaaggtgggatcaggtagaagggcaggcagaaaggaggctggtgtgggtgtgggcccaggaacggggagctgatcaggtcactgctagtgaaatggccttcatcatccgaaagctgcatccggttcttttttgtggggggttcttcggactcttgcttaattgcgncgatnctttctcccatcgtgaacctgcgtccgtggtcacttttgaagcacggctgctcactgcgcaagtcgcccttctccgantctcctccatagccactgtctgtgtccgtgtcgctg

SEQ ID NO: 1347 - DNA, 510 bp, homo sapiens
  misc_feature (463)..(490): n=unknown
aaccattccctcacagtaaaacaacaatacaggctagggatggtaatcctttaaacatacaaaaattgctcgtattataaattacccagtttagaggggaaaaaagaaaataattattcctaaacaaatggataagtagaattaatgattgaggcaggaccctacagagtgtgggaactgctggggatctagagaattcagtgggaccaatgaaagcatggctgagaaatagcagggtagtccaggatagtctaagggaggtgttcccatctgagcccagagataagggtgtcttcctagaacattagccgtagtggaattaacaggaaatcatgagggtgacgtagaattgagtcttccaggggactctatcagaactggaccatttccaagtatataacgatgagccctctaatgctaggagtagcaaatggtcctaggaaggggactgaggattcttttntgttgggtggaaaataaatacagaacnaaccctgtgtcactgtccca

SEQ ID NO: 1348 - DNA, 151 bp, homo sapiens
  misc_feature (20)..(123): n=unknown
taagagtagcatgcaagatnttgtaaaatgcnttannggaaccaananangttgcactgaaagcttacaaaacanagacanntaaagcnttntntcanaagcaacanttgtgttctccanncncacctcattggaactgacatgaagaagg

SEQ ID NO: 1349 - DNA, 318 bp, homo sapiens
  misc_feature (279)..(279): n=unknown
ccaatctgaggaccttcagagacagtctacgccttaacaagcacatgaaggaaactattttgaatgttctctttggcaacttatccataatttgggatcaaatgttaaaaccagaaaagtgtttagtgtggatttcagcaaaacctgatcatcccacccagaagaccttctcatcaatagatcgcccttaaagacccattgtaaggtcataaaaaacctcggccaactgcacaaagatggtgcctcactgcaacaagaaaccttaaggtgtcttaccgncgaaataaaaaacataaatgattgttctccaaggcctga

SEQ ID NO: 1350 - DNA, 575 bp, homo sapiens
  misc_feature (184)..(184): n=unknown
  misc_feature (444)..(528): n=unknown
cgtagacgtcttaaaacagtttttgtttcaagacaaagatgggggatattggattgactgattactttcgcacctaaaactgaaaggaaaaaacttaatacaagaattggaattgaaaaccctagcaggatacctagtaggtaagggtttggatatatctgtatctgctcataagtaaaacagngattgtgcaaatggtactcgcctaagtaccattaggttattggtattaaggtactaagtacaaggcaggtatcagccactggtttgaaaaaattcaaaccagtaaaagatgagtcacaaaactcctccagccaaacctggtaaatttggtttgcttctggcctgaaggcagtgtgaaagtgaaataagtttcacacttaaaactagctgacacctttatatcttgaccacctaaatttggtcatctacctggaaagtggnaattcacaagaacgtaccctaatattttaactggtctttagttgggacattctaagagganggacattgntccagantggggtngacttgctcatcatgagtcttgccctcaggccttggagaacaatcat

SEQ ID NO: 1351 - DNA, 450 bp, homo sapiens
aaccttgatcccagcaatgtggattccctcttctacgctgcccaggccagccaggccctctcaggatgtgagatctctatttcaaatgagaccaaagatctgcttctggcagctgtcagtgaggactcatctgttacccagatctaccatgcagttgcagctctaagtggctttggccttcccttggcatcccaagaagcactcagtgcccttactgctcgtctcagcaaggaggagactgtgctggcaacagtccaggctctgcagacagcatcccacctgtcccagcaggctgacctgaggagcatcgtggaggagattgaggaccttgttgctcgcctggatgaactcgggggcgtgtatctccagtttgaagaaggactggaaacaacagcgttatttgtggctgccaactacaagctcatggatcatgtggggatgagcatccat

SEQ ID NO: 1352 - DNA, 500 bp, homo sapiens
  misc_feature (26)..(26): n=unknown
  misc_feature (490)..(490): n=unknown
ctttcaaaatccaagccataattggngaggggggagtttcagaattacatagaaaaattaatatttgaaaaaataattctgaaatttcgaatttaaaaacagatgtgctgcttctgggtgtaggtagtaaaagtataggaaaagaactgtttccttagaagcggactgtggaagggctatgtagaatgtcaaagggcaacaagagcctgtgtttttaatgtcatcctgtactcggcacaaatcaaaggccaatacaagtctgaaaagcagaaataaatatttttccaggtttttgcttgggcacatactaactgctttgggcattctaatctggtctccaaacaccaaagacccatttcgagcctgctattagcctgctgctgactctatcacttggagcaataatgtggggttatggtggtggaatcttgtatatttttgtccaaaataaaaccatgagttaaggggatagataagatggaaaaatacncaataaatac

SEQ ID NO: 1353 - DNA, 480 bp, homo sapiens
ccatctatatctatccccttaactcatggttttatttttgacaaaaatatacaagattccaccaccataaccccacattattgctccaagtgatagagtcagcagcaggctaatagcaggctcgaaatgggtctttggtgtttggagaccagattagaatgcccaaagcagttagtatgtgcccaagcaaaaacctggaaaaatatttatttctgcttttcagacttgtattggcctttgatttgtgccgagtacaggatgacattaaaaacacaggctcttgttgccctttgacattctacatagcccttccacagtccgcttctaaggaaacagttcttttcctatacttttactacctacacccagaagcagcacatctgtttttaaattcgaaatttcagaattattttttcaaatattaatttttctatgtaattctgaaactcccccctcaccaattatggcttggattttgaa

SEQ ID NO: 1354 - DNA, 492 bp, homo sapiens
  misc_feature (153)..(223): n=unknown
cttggaagtcagtcgtagtcctcgcaggtctcggcgggagtggaagtgcgcagtccacgacagaacaaatattcggtgcttttacctacctacaacgagcgcgagaacctgccgctcatcgtgtggctgctggtgaaaagcttctccgagagnnnnnnnnnnnnnnnnnnnnnnnnnnnnnnnnnnnnnnnnnnnnnnnnnnnnnnnnnnnnnnnnnnnnnnntggagaagatctatgggtcagacagaattcttctaagaccacgagagaaaaagttgggactaggaactgcatatattcatggaatgaaacatgccacaggaaactacatcattattatggatgctgatctctcacaccatccaaaatttattcctgaatttattaggaagcaaaaggagggtaattttgatattgtctctggaactcgctacaaaggaaatggaggtgtatatggctgggatttgaaaagaaaaataatcagtgatgga

SEQ ID NO: 1355 - DNA, 259 bp, homo sapiens
  misc_feature (139)..(250): n=unknown
tgaactgttaaaactaaaggcacttaaaacaagaatgtgactagtgtgaaacaagatgggcaactcaaatggtgagaagtaaacatacagtggtctgttatggcactaactcaaagtaagactcgcgtaggtgaagatnngttgcntagccacantataacttcacatggtcattaaanaggcaaatttgaccgctaaaacttcnnagnaaaagtactcataaaaaagtnttaccccaaaatngccaacnaatacatta

SEQ ID NO: 1356 - DNA, 523 bp, homo sapiens
gattacaggcgtgagcaccacacccatcctcacattactttcatgatggttatcttctaagatttccattataaaatacagagtgtggtgagcattcttgtacatacatcttacatacttgtgcaaatatatatgtaggttaaattctaagatgtggaattgcaaagtttgtaaagtgtgtagttttcatttgataaacttaaaaaatcaatatcaaaattaaagtcataattttatattgataaggccctggtgaatttataaaatcaaacttatttttctaggtcctaggcctacttacaagcctccagtctcaaattatccaggatatcctaaacctgaggaaggaatacttgacagtttggatgtttgggtcattgctgtgattgttattgccatagttgttggagttgcagtaatttgtgttgtcccgtacagatatcttcaaaggaggaagaagaaagggaaagcagatggtggagctgaatatgccacttaccagactaatcaaccactccagcag

SEQ ID NO: 1357 - DNA, 572 bp, homo sapiens
  misc_feature (568)..(568): n=unknown
ccattttttaaaaaatgagcaataaagaacctctatcagtgagacttctcattttatagcaaatacatttttgcagcttaaattttcttgaattcatatacgcttctgtcatttaaacaaacttccagagaaaactggtctctatatatttaagtaacaaatttgacaaaatacatatttatacatatatagatctctaatataaatattaaatttgaaaaaatcaaatgtgaagcagaaactgctatacaagtatattgtataatatttattttatacattaaagtatttggttgaatatacttcaattaggtttctaaaaaacaccattatctgcttcttagtaattgcgacattcttgaaaagcatgtgaaacgggtataaacttcaactctgtgcttaattcagaattcctgtttgttctcctcaaacttttatcttcctaaagcatcttgccagagactacaaaggaaaggaacatttacagagcactataaacatgtcttggacagtaaaacagtatttattcttctacactcctgattttccaatccatatcttcctcaangcaa

SEQ ID NO: 1358 - DNA, 458 bp, homo sapiens
  misc_feature (303)..(303): n=unknown
  misc_feature (437)..(437): n=unknown
gccggtgacgtggatatcggcgatgccgcctactacttcgagagggacatcaagggcgagtctctattccagggccgcggcggcctggacttgcgcgtgcgcggagaacccctgcaggtggagcgcacgctcatctattacctggacgagattcccccgaagttctccatgaagcgcctcaccgccggcctcatcgccgtcatcgtggtggtcgtggtggccctcgtcgccggcatggccgtcctggtgatcaccaaccggagaaagtcggggaagtacaagaaggtggagatcaaggaatgngggagttgagaaaggaaccgagcttgtaggtacccggcggggcaggggatggggtggggtaccggatttcggtatcgtcccagacccaaagtgagtcacgcttcctgattcctcggcgcaaaggagacgtttanctttcaaattcctgcttcccc

SEQ ID NO: 1359 - DNA, 534 bp, homo sapiens
  misc_feature (65)..(65): n=unknown
ataaaattacagcaacattatcaaagacaacatatgtacaaacattttacaaaaaagaacattancaatatcagtggcagtaagggcaagctgaagaataaatagactgagtttccgggcaatgtctgtcctcaaagacatccaaactgcgttcaggcagctgaaacaggcttctttcccagtgacaagcatatgtggtcagtaatacaaacgatggtaaatgaggctactacataggcccagttaacaaactcctcttctcctcgggtaggccatgatacaagtggaactcatcaaataatttaaacccaaggcgataacaacgctatttcccatctaaactcatttaagccttcacaatgtcgcaatgggattcagttacttgcaaacgatcccgggttgtcatacagatacttgttttttacacataacgctgtgccatcccttccttcactgccccagtcaggttcctgttgttggaccgaaaagggatacattttagaaatgcttccctcaagacagagtgagaaagaa

SEQ ID NO: 1360 - DNA, 336 bp, homo sapiens
  misc_feature (205)..(310): n=unknown
ttcctgggccactgtcctagactgcactgcaggaatgcctcatgccggtcgagctctgccctgctgtgagcagcagccaccacacagcttctaaggctgcgatgagcaacctgggtgcaatagaagccacggggaagccttgacccagacttgggaggagtagggagcttcacaggacaggtgacatcttagctgagacttgaanggccgggagcagtgagtcaggccgagaagtagcaaagaagactnttctgcacanaggaacacaggnttcaaggctggctngaggctacgagaatgtncccaccgnggacatccacatgaagccagtggggt

SEQ ID NO: 1361 - DNA, 359 bp, homo sapiens
tttgagatgtagtgctggggcatctatatgtttttttaaaagaaccaagagattacaatgggtagccaaggtttgagaatccctgctttgatatgcagctgacaagttatagtattttcacattggtagtcgcagcacctgctagcagtgtaatatgctttacttgaatcatttccacatctgcacctcaattccctgggcctggggttgccatttggtaggggaggagcttatcaggagttcctttgcaagtgcaggagggcagtcctgggttctgttagtgacagcgtgatttcagtgaaataatttagaccccccaagcagactgtgcaacggatagcccctggagagtgcccgtg

SEQ ID NO: 1362 - DNA, 508 bp, homo sapiens
  misc_feature (360)..(360): n=unknown
  misc_feature (491)..(491): n=unknown
aatggaaactcttattagatgctgcatgtactgtgctatggaccacgcacatacagccatgctgtttcagaagacttgaaatgccattgatagtttaaaaactctacacccgatggagaatcgaggaagacaatttaatgtttcatctgaatccagaggtgcatcaaattaaatgacagctccacttggcaaataatagctgttacttgatggtatccaagaagaaatggttggtgatggataaattcagaaatgcttccccaacggtgggtggtttttaaaaagtttcaggtcacaacccttgcagaaaacactgatgcccaacacactgattcgcggtccaggaaacacgggtcttcnaagttccaaggggctggggttccccaacgatcaagttcctgtgctgtaatcaagagggtcctttggactggatagggagcacttgggagctgtacaccatcagtcataatggatggcagtgtaaaagatgnttcaaatgacctagtga

SEQ ID NO: 1363 - DNA, 306 bp, homo sapiens
  misc_feature (92)..(268): n=unknown
cgctgaccaaccagatcgatgagaactggtacgagggcatgctggacggccagtcgggcttcttcccgctcagctacgtggaggtgcttgtncccctgccgcagtgactcaaccgtntccccgccccggcccttcgtccaaaatggcggcaacccctgctgggtctcctgcattccacggagcccctgctgccagggcggtgtctgancctgccggcgccacctgggccccggcccttgaggtatccctgagcaggaccccacacttnggtgggggggttatctgggtgggtggggatgcctgttt

SEQ ID NO: 1364 - DNA, 488 bp, homo sapiens
  misc_feature (14)..(65): n=unknown
  misc_feature (286)..(424): n=unknown
tcaatatgcactgnaccgtgcccaaagctgtgtgctcatctctgcgcccctcatgtacttctgangaggggggtgcagggcagggcagagcagagcctggggtccggaggcttcactggaccacagagggaggggaatgtgaatgtgggctggcccagagaactccccatttcatcgattttgcattgggcgatagaggaagcagatgtcggggctgcctgccttggtctagaggagatggctggggccacttccccacagggtgaagtggcagcggctcagcaangggagcctggccaccaggggctgggaaatgcgctcactggaacctttgtgcttggccctcggcagcgcggctgtggtcccgtgttaagtgtnctgntttgggtgtgggtggctggtggtggcagcttgttccagagtnacaaaggcctccctgggttgggatgggggcagttaaaaaaactgaaaaggtaacttggctttct

SEQ ID NO: 1365 - DNA, 552 bp, homo sapiens
  misc_feature (522)..(522): n=unknown
gggcacctggcctgggtggagcccactcctcagcacccacctcacttcttgcagtattctgcagaccccagccctgtgcctgtgctcctggacagctggagataaggagtgggccctggaagatgctcattcaggccctgctcaagattccagtcctgattgctggactcgctgaagagagactacgcaggaaagccccagccacccatcaaatcagagagaaggaatccaccttcttacgctatggcaggtaagaaagtactcattgtctatgcacaccaggaacccaagtctttcaacggatccttgaagaatgtggctgtagatgaactgagcaggcagggctgcaccgtcacagtgtctgatttgtatgccatgaatttgagccgagggccacagacaaagatatcactgatatctttctaatcctgaggttttcaattatggagtggaaacccacgaagcctacaagcaaaggtctctggctagcgacatcatgatgagcagaaaaaggttcgggangctgacctagtgtatttcagttcccgctgt

SEQ ID NO: 1366 - DNA, 332 bp, homo sapiens
  misc_feature (14)..(314): n=unknown
ctctttgctttttnctncccctcctagtgtnctgcttacgtnangcccacgtgccacananttattncccgaagtnccagtnggctgtgcaggggatgggctcttccttcnagatggtntgcancctctggnaccacgcagcnaccatcccctttctttcttcttcggatgcaatttcaggagcaaagctgatctgaggggcaaggactttaaatccanagaagtgtaatgtgccatgctggantgnccacaggaagtatcgagantntcnattgactcctgtnttcgtgnacatctcggcngtgcctcccgtngttacggaaaggagcgct

SEQ ID NO: 1367 - DNA, 321 bp, homo sapiens
  misc_feature (292)..(292): n=unknown
cagggctccagtgccctccacagaactccacacccagcccagcaagcccctccataatgggtgctgagagtggcaggcatggggctcttgttacatcagagccccaggaaacaggcggtcacagactattctgagtgggcagaggaggtccacctatggacacacgtttagagaagctgaggagttcatccctgaagacatccagcccgggccggggctgttcctgaggatgcagctggtgccctccatagaagagagggagacacccattgactcgagaggaccggccagntctccaggagccgcttggtctctgggatg

SEQ ID NO: 1368 - DNA, 378 bp, homo sapiens
  misc_feature (16)..(17): n=unknown
atgacatctggattannggaagaaaggagcctgactcttatgatggaataaccacaaatcagagaggagtcacaatagcagctcttggtgcagactgtataccgatagtttttgcagatccagtcaaaaaagcatgtggggttgctcacgctggttggaaaggtactttgttgggtgttgctatggctacagtgaatgctatgatagcagaatatggctgcagtttggaagacattgttgttgtacttggaccttcagtaggaccttgctgttttactcttccaagggaatcagcagaggcatttcataatcttcatcctgcatgtgtacaactatttgattcaccaaatccctgtatcgacatccgtaaagccacaa

SEQ ID NO: 1369 - DNA, 358 bp, homo sapiens
  misc_feature (4)..(356): n=unknown
tttnacattgcatttnanacccttacttatctgtttccaacctgtttttccagccctaactcatgcccacacncttctctctctagaatatgttatncactttcagtttcatgccctgnttcatggtgttccctctacctgttatggttgttcttcatttgtcanaaacctctacatctttcnagcccatgtnatntgtgatttnctctgtaatattttctctatccngcttctgggtaaaattaacctctattccttatgttctctnctactgcnattaaaattanntttaagtngtagaagngnttatctccttcactgtatcagactcaaagganagaagttgtgttcatttnga

SEQ ID NO: 1370 - DNA, 535 bp, homo sapiens
  misc_feature (40)..(40): n=unknown
  misc_feature (152)..(152): n=unknown
  misc_feature (276)..(276): n=unknown
ccggtttacagccgcggaaaaacaactcggaccagatccnggaggggaatgggggctgggtggccaaaattcagtccagaggatcgaagcggctgctttaacagaagttggggctgcgtaacaacagctccaagcaaagcttcaggctgatncggaaagatgaggaagcagaaaagagactaaagacagacggacaggatggctggggacaacgacagggacccagtgaaaatacgggcaataccgagggctgtaaccctaacacgggcaaatttngaggggctaacatgggcggaaaccatccgtaccagtcaccaccactgtctccagctgtcccagaaccggactcttcctgccatcaaaatggcggcggcgacggcagcggtggtagcacctacgctggcggtgagcaggcaaaggaagttgcttccgagcgcgtcgaaacgatgatgcgcacgcgcaaagtagggcctacgtggagccgacctgccattgggctccatacctacctaacatctatcttctcaagaacttc

SEQ ID NO: 1371 - DNA, 289 bp, homo sapiens
  misc_feature (31)..(265): n=unknown
gaagagtcagaggtgaatagctgtctctcantggtnatnctgttttcccntatctacatgttttcctccntnnantctctcttggtntgtncatatccttcagaggtaaagaggagcctttcagagagctataaaggtttatcaaagtaccagatnatgagatatatttggaggctaatatgtaatccntggggtttccagtctcatcncacccgnacagctgcctgtattaatgcttnctgattaacatatggtctccttntnnttctagaaaacactagatctgaat

SEQ ID NO: 1372 - DNA, 385 bp, homo sapiens
  misc_feature (162)..(233): n=unknown
  misc_feature (382)..(382): n=unknown
aaataatgacaacagtatgtgatagttgctttattcatgtctttgtttgaaaaacaaaaaccagataaccctaggtctctctccaaaatttctttttttaaaaatgtattggggaaaaatatacttggcttacaaaatatgcctgtatacttggtgacatangtacaggttttgcttggggcaaatactgatcaagaaattcaaatgccttctgggaggtgtgaagtaggccnatgccaccttaggaaatgattcagcacaagggaagtcttcagaattaaagatttctttaccagagaaaacatatttgactagtggattataggtaacatttcccaggtgctgctataaataaaatttaaaataagcccaacttactggnata

SEQ ID NO: 1373 - DNA, 259 bp, homo sapiens
aatggattagaactataaagattcttaactttgaaagcagaaatataagttggatagtagttgcagatctttaataccattttcaatttcatttatgagctgctacattataaatgagatgctctaaaataataatcgcttttgttgttgttgttatagaacaatgaaaattcctgttaggaacacaagttgctgtttatatttgcttgttctcttaaatagtatgagaagaagtaaggtggagctgttggaaaagccc

SEQ ID NO: 1374 - DNA, 463 bp, homo sapiens
  misc_feature (14)..(14): n=unknown
gattcttgtgaggnaaacatggtggtgccttcaagggatggaaaattcagtccaattcaagagaaaagcccaaaacaggccttgtcgtctcacatgtattcagcatccttacttcgtctgagccagcctgctgcaggtggggtacttacctgtgaggcagagttgggcgttgaggcttgcagactcacagacactgacgctgccattgcagaagatccaccagatgctattgctgggctccaagcagaatggatgcagatgagttcacttgggactgttgatgctccaaacttcattgttgggaacccatgggatgataagctgattttcaaacttttatctgggctttctaaaccagtgagttcctatccaaatacttttgaatggcaatgtaaacttccagcccatcaagcccaagactgaatttcaattgggttctaagctggtctatgtccatcacttc

SEQ ID NO: 1375 - DNA, 566 bp, homo sapiens
  misc_feature (3)..(3): n=unknown
  misc_feature (563)..(563): n=unknown
gancgcttacattctaagagcagtacaattagcctattacgtagggccctaatcttgttagtatagtgttgttgaaatactttcttcagcttttgccttaacaaatccaaagatggaagatgatgacaatctggaatattcaacataacatgaaaaaattcattccacatatccaaatgaggaagccttctaaaaagaccttcaggcttacactctcctccttcatttttcactttcatgtaagtgccaaagagcatgcaatatactgttgcagcaaccccaaagtaatcgatctggtagttccatggtttgttgctgagcatctcaacacactgaaaaccagatgtttcacactttgctgtgaatatagttccttttggaaaaagtttcatatctatactctgacccaggtcaatcagtgccaagccagcagataaatcatcttcatcatcctgttccaaaaatccgtttccaagtatgaaattgtctggtttaatgtctccatgaatgatttcacagtcatgcacttgctcaatcatgtaaagcattctcatagcaaaagngat

SEQ ID NO: 1376 - DNA, 451 bp, homo sapiens
  misc_feature (90)..(90): n=unknown
  misc_feature (234)..(435): n=unknown
ctcacatccatgaagaaggtaaaatccctacgtgatccttctgccaaaatgtcgaaatcagaccctgacaaactggccaccgtccgaatnacagacagcccagaggagatagtgcagaaattccgcaaggctgtgacagacttcacctcggaggtcacctatgacccggctggccgcgctggcgtgtccaacatagtggcggtgcatgccgcggtgacggggctctccgtggangaagttgtgcgccgcagcggggcnatgaacactgctcgctacaagctggccgtgngcagatgctgtgaantganaagtttgccccaattaaagcgtgaaattgagaaaactgaagctggacaaaggaccaatttngagaagggttttacaaattgggatcagcaaaagccaaaagaattagcattacactgtgtgccaagnaggtgaagaaattggt

SEQ ID NO: 1377 - DNA, 277 bp, homo sapiens
cacaatcctttcaaagtttcctttaaaggggaaaaaacagaggcttgtaagaaatatgctcaaagaggttctaggacttacagacatcccattccagtataagatacaaaaggcaaaatgtttcctttacccatgatccaggctagctccaagaatcctaaaaacgatgttttaatttggaatctgggatggggcgttttgtggattaacatgtgttctgacacaaggactactctacttccttaagaaacatgagcaaaaatgctttgctcaacaa

SEQ ID NO: 1378 - DNA, 472 bp, homo sapiens
  misc_feature (336)..(437): n=unknown
atgaaatcatgtttttttaacaaaagagataaaatacaattgaagcaaaaaataacagctagtatataatatatacagtctgtatttgcttttcacagtaggcctgatgactaaaagatatgctttattacacgctattttcacctcttgaaagtcaaaggtgatgattaatttcatttagcagggaagtggaataatatcttttgaaataactaagtccactaaattatacagtatgctattctggttctaagtacatattagtcccttggcaaatctgttctttcaaagcataccttccccaaatgagcctacctacttcttaaaaaacatatnacacaatgtggtagtagtaggtgtaaggaangtaagttttttcatagtggtatgcaaacatatcattganatattacatagatataaagacttaggggatnaaaatagcagcaaccaaatacttggatagatttat

SEQ ID NO: 1379 - DNA, 50 bp, homo sapiens
  misc_feature (15)..(46): n=unknown
acatagtttttgtananattaagcatctccagttnccntcgcagangcct

SEQ ID NO: 1380 - DNA, 270 bp, homo sapiens
  misc_feature (25)..(214): n=unknown
gcgcccaggacggagactatcaaangccacacagcgcacagcctgcggacangggctacnaccggcccanagctgtcagcgcnctcnccaccganagcggacaccctgactntcacaagcccccaacgcatcccgggacnngtgacagctattctgcccccagagactgcctcacacccctcaaccagacggccatgactgcccttttgtgaanaccaatgtgaaagaagcctgctgtggtactgagcgtcgggctgtcacaaggcactg

SEQ ID NO: 1381 - DNA, 510 bp, homo sapiens
  misc_feature (90)..(90): n=unknown
accatgtaaactctacaaagtaaaccacttcccctccacactaaccagcagctagtctgccatgaccttccagcacccccattattttancatatatacatttcacaggatgtaataaccacacaaatagggttataatacattcttcagggaaaaaaatttttggtccatattttctattaaaaaaacacacacacttccctctttggcaaaagaggttaaatctcccatagttaactcacaaaagaaactcaaataaaaactactgagcatgaggtacagctgatgtctggactgttctggaattacagacgcctccttgaggggaaaatcatttcttataaaatgagatcagtttccaacagtttcatgtcagtagaaaagctcgatttagacttggtcagaatcacttttgcatgaacatgttccaaataactttgtttttcagaggacagcggaagtccccgaaaatgtgctacttctgaaggaaaggtcatgaaaattgtggcg

SEQ ID NO: 1382 - DNA, 304 bp, homo sapiens
  misc_feature (275)..(291): n=unknown
atgatgtttgttttgcaacattgagatttcctaccattacatgtcattaaaggctggttttatagaaaaggcaatgtctcttgataaacagaaattaagtggaaagcattatcgtaaaaagatacatgatagttaaataggaaaaattgaatgacttcagttttgaatttgttcgttaaccctgaaagaattgttgttgttatttttagaaatacaaaacccaaactgactttactgagtcttagtggaaaaacactttgtgtgactgcaggatnggctccctctctgatncaacagttctagt

SEQ ID NO: 1383 - DNA, 513 bp, homo sapiens
tattccatcaaattatccaggaaaatccaggtggcagaaatatataatatgtccatttcatcaagaggtctcaaataaattttaaaaggccagaaaatgatatatatactatgccatttaaatcacttctatcttctgtacttaagaactcaagtatagaaataaactgtgggctgaagtaacattgtaacctgctcccaacatgactgcataggtgtctaaggttaagtgtgaagattactgtgaggtctcaagttacttgactaatcaatcccatttgaatttcaatccaagcagcatattttacacacacctgaaggaaatatcttcagtgtgttcatgtgtgtgtctatgtgcatgtatgtgtaggggataggtgtaattagggaagggctgaccgaacaacattgataagtacatgctagaaagtctgctgttgttggtaacacagaaacatacacagtcttcatattcaaagtcttcacggggatgtcttctgtaatttcctgcgtt

SEQ ID NO: 1384 - DNA, 558 bp, homo sapiens
  misc_feature (48)..(48): n=unknown
aaatgacttaaagccaccagctaattgggcttaatcatttggactcanttgactcttcccctacccctacccatgcctaaaccaaagaaaggatcatcccacatttacctagcacaaagaaatctactcttctgctctttctaggactgctaaaggccatgggaactggacacctggatgctgcagaggaagggcaaagctcaacatcaacttggacagtttgccaacctgtttgtgagattgctgatttgctccttaagcaagagattcactgccgctaagcatggctcagaccaactcgttcttcatgctgatctcctccctgatgttcctgtctctgagccaaggccaggagtcccagacagagctgcctaatccccgaatcagctgcccagaaggcaccaatgcctatcgctcctatgctactactttaatgaagaccctgagacctgggttgatgcagatctctattgccagaacatgaattcaggcaacctggtgtctgtgctcacccaggcggaaggtgccttcgtggctcactgattaaggagagtagca

SEQ ID NO: 1385 - DNA, 274 bp, homo sapiens
  misc_feature (45)..(54): n=unknown
  misc_feature (209)..(271): n=unknown
agtctgtaactttctttttgcagcttaaacaacagaatttgctgntctccctcncctttcctgcaatttaattccttacagattttgccatggggtgcggacttagaaagctagaagaccctgatgatagcagccctggaaaaatattttctaccctgaagagaccgcaagtggaaacaaagacagaatttgcttacgaatatgtattnctggattttactctacaaggtactttttgcttctattttgtttgttaaatgattnagagaanaga

SEQ ID NO: 1386 - DNA, 549 bp, homo sapiens
  misc_feature (284)..(293): n=unknown
  misc_feature (539)..(539): n=unknown
gatgtattaaaaaattaacggacaatcagacctcaaccatgatcagagcgactgctaggtcggcgcccgatcggcaagaagagattagcaaattgatgcgaagtgcaagtttcaacacagatccatacgtccgtgaatttggaatcatggtcaaagatgagatgacagacgtgactgggcgggtgctgcagccgccctccatcctctacgggggcaggaataaagctattgcgacccctgtccagggcgtctgggacatgcggaacaagcagttccacacgggnntnnanccnaggtgtgggccattgcgtgcttcgccccccagcgccagtgcacggaagtccatctgaagtccttcacagagcagctcagaaagatctcgagagacgccggcatgcccatccagggccagccgtgctttgcaaatacgcgcagggggcggacagcgtggagcccatgttccggcacctgaagaacacgtatgcgggcctgcagctggtggtggtcatctgcccgtcaagacgcccgtgtacgccgangtcaagcgcg

SEQ ID NO: 1387 - DNA, 450 bp, homo sapiens
  misc_feature (418)..(419): n=unknown
cttggccaaactttcaccttagcttctggtaagtcttgggccaagctaagcagcatctatcaatcatcccttcagctcctgattggtcctgggccaaaggcctgggccaagctgagccacacgtttttcaagacagcctgtgaactaggcacatttccttcccttcccagtccttaaaaaccctggacccagcctcgtagaggcaccactttcagacacctatctctgctggcaaagagctttcttctcttgcttcttaaactttcactccaacctcacctttgtgtttacactccttaatctccttagaggtagaacaaagaactctggatgttatctcagactacgagagactgttacatcttggtgcatgctgagactatgacacttggtttctttgagtttgactaaatatttnntatgagtgtaattatacagctttcctttttg

SEQ ID NO: 1388 - DNA, 228 bp, homo sapiens
  misc_feature (118)..(189): n=unknown
cttttgaatattctcaccacaaaaataacaaatgcatgaggcaacaagtatagaagtactctgatttttattgttatacaacatatatatataattgtttccccaaaatatgcacatnacatgtgtcaattttaanaaatgaanccagactataatgtaaacctatagctgnaaattcctagcacatancagaagggtgaagcttcatgacaactggtcgtgggcata

SEQ ID NO: 1389 - DNA, 375 bp, homo sapiens
  misc_feature (201)..(201): n=unknown
  misc_feature (363)..(363): n=unknown
cttcctttagtccccttgtgttctcgccctacctctgtatttgacttccactttcctgatttaatcctgtccccctctccttggttccgccctctgcagctctaacaccatcccttccctcccccgcaggccattccagttttatcacccacctggattgggcccaggacagcagctgctttgtcaccaactccggggacnatgagattctgtactgggacccggctacctgtaagcagatcaccagtgcggatgctgtgaggaacatggaatgggccacagctacttgtgtcctagggtttggggtgtttgggatctggtctgaaggggcggacggcactgatatcaacgctgtggcccgcnctatgatgggaa

SEQ ID NO: 1390 - DNA, 411 bp, homo sapiens
  misc_feature (87)..(135): n=unknown
  misc_feature (341)..(391): n=unknown
ggacatgtcatttctctcagctcgtttctgtcccctaaagtgagaatattgtctgggaagattacattagacgatgtatatgcgaanacacttgatagctggtattgtcatgattctgnttagttcactactgcnactttccctgtggcctaggctttgcctatttccagtgggcgagctagctagatcctcctcccttaaataagccagtgtttttaagacagaatactacttgcatagtggacaataatatcttaaagaactgagcaggatgaaaagaatttgatagaaagcaggtttgaggagcacattggaggttggcaggtttcgaggctgctganaggacntgggccgatctgggctggggttggacgtgaaccctggcacccangcaggtggatcccagctggg

SEQ ID NO: 1391 - DNA, 480 bp, homo sapiens
  misc_feature (428)..(475): n=unknown
aattgatcttagtgataattttacagaggcagacattgcacataggtatgactgcaaaaatgggtggctaactctgggaagatacttgtgttaaactttatatgacatttaataacccttcatcataaggcaatgttttttacaaaaagattgaaaaaatcatgtaagtcatttactctgcaaaaatggcacattaggtggggttccaaaatccataatgaaacaatgtgttttgcaactaagaaacattcattatgatatatggaaaacactgtctgtctacttgtcctttacgaaaaaatgtaaaactctgaggatcataaaatttaactactaaaaataatcttcgtgtttaagtgatacttatttaagactttacactgttctgtttaaccatggtctcctgtctgattttagccataattgcnaagtatttctaactacaacaatttaattttagacacacccgtgaggnagttg

SEQ ID NO: 1392 - DNA, 558 bp, homo sapiens
ggtataaagtcctgttcccaagtccaaaccactttttaacttaaatcttgagtttttctgaattactcaatttgaagtaattctctttatatctgaaaaatggttttattgaaacgtttgagattaaaaaatatgcattgcaagaagcatatgacaaacattctgagagtacaaaattagttgtaaaaaataacataatttaccagtaaacccactcatatagaaatgtgcaaagccttttgatataaaaagttttgtacaccaagcacctatttttataacttagcttcccatggagagataatggcttgcgtgcattttatgtatccataacatacatacaaggctcggtcttttcaatgggataacagttcacaactcttcgatttgaattgtaatgaatctggtgacaaggatttttctctaatggattccaaagttagccagaacttttaatgtcaagatgaaaaagggtgtaaggtgttatattttcttcaattcctttaccacaggaggctaactccacaatttccctcatgtttctcattcagaaaaaaa

SEQ ID NO: 1393 - DNA, 503 bp, homo sapiens
  misc_feature (472)..(494): n=unknown
gatactttagcacaggatgcaaatgctgcacagcaggaactgaagttattgcttcatcgttctactctgttgttttcacaaggcaaaatgtatggttatgtggataccttacttactatgttagccatgcttttaaaggtagcaatgaatcgagcccaagtttgtttgatatccagttccaagtctggagagaggcatctttatcttattaaagtatcgagagacaaaatatcagacagcaatgaccaagagtcagcaaattgtgatgcaaaagcaatatttgctgtgctcacaagcgtcttgacaaaggatgactggtggaatcttctgttgaaggccatatactccttatgtgacctatcccgatttcaagaggctgagttgcttgtagattcctcattggaatattactccattttatgatgacaggcaaaaacgcaaagaactagaatactttggtctgtctgctgcnattctggacaanaatttcaganaggctacaa

SEQ ID NO: 1394 - DNA, 368 bp, homo sapiens
  misc_feature (314)..(345): n=unknown
gatcattatcacatattaaaaataaatacactgtttgttaggtaattctgaaattgtcatttctattttggagttacaaataataagccctgagacagaagacactggtcctcacacagcagctgccattgctctgttctcagttgcggtgctttatatagaacaataggtatacaaaagcgtttgagccattccggtattcccactgctctgatagatgagagacaagttgtaggcaatatctcttcgtaagtctaactggtcaagttctataccctctaccacaagtggagggagctccagggccttctganaatagtggattgcaagatgaatcagcccccnaacctgatgaaggcccacgggcc

SEQ ID NO: 1395 - DNA, 449 bp, homo sapiens
  misc_feature (100)..(139): n=unknown
  misc_feature (244)..(244): n=unknown
gaagggccggcggctctggctgcccggcggttgagagcatggcctctccaggggcaggtagggcgcctccggagttaccggagcggaactgcgggtaccngaagtcgagtactgggatcagcgctaccaaggcgcacgnttctgccccctacgattggttcggggacttctcctccttccgtgccctcctagagccggagctgcggcccgaggaccgtatccttgtgctaggttgcgggaacantgccctgagctacgagctgttcctcggaggcttccctaatgtgaccagtgtggactactcatcagtcgtggtggctgccatgcaggctcgccatgcccatgtgccgcagctgcgctgggagaccatggatgtgcggaactggacttccccagtgcttcttttgatgtggtgctcgagaagggcacgctggatgccctgtggctgg

SEQ ID NO: 1396 - DNA, 496 bp, homo sapiens
tcgctcccaccctctatcttaggcatgaggcccctgggatgtaagcaccttggacccaaccccaagtcctaagtcaggaattccaactacctgaggagcccagggcagaatggcaggaagggtggaggaccatgctctggcctcagagctgaatggcactaaggaagtcctcatgatctgagtcctgaaggaagcaaggtgaggtgggaggtctggggggtgagaggatttgggcccccagagccagctgggccacactgagcttcccgcccttgtgcatgaggtagagatggaagtggaaaccgctgccataggtagcatgcctcagggaccagccataataggcttgggcatagtgtctggtccgaaagtggggggcagcagaagtcattgagataaaccggcctccagggacaagcacgcggctcacctcactcaacacctggtccacagtgtggacaccttcagaggacacggtccagggatctcgtttccc

SEQ ID NO: 1397 - DNA, 368 bp, homo sapiens
  misc_feature (46)..(46): n=unknown
ctgtcattacacacaccctgggtcttcatatgtggccgccaggtangagcatcacagtcaagctacgggagaaaacagtttccaggaaactggaaatgaacggcccgagtgctttccaggggctcatctgtgggaagtataatggaatgtgcttacaagggccagcaggagtgcctggtcgagacgggagccctggggccaatggcattccgggtacacctgggatcccaggtcgggatggattcaaaggagaaaagggggaatgtctgagggaaagctttgaggagtcctggacacccaactacaagcagtgttcatggagttcattgaattatggcatagatcttgggaaaattgcggagtgtaca

SEQ ID NO: 1398 - DNA, 531 bp, homo sapiens
agatataaaaaaaattcttaacatttacaaattgtacaaagattggtagcttttatatttttttaaaaatgctatactaagagaaaaaacaaaagaccacaacaatattccaaattataggttgagagaatgtgactatgaagaaagtattctaaccaactaaaaaaaatattgaaaccacttttgattgaagcaaaatgaataatgctagatttaaaaacagtgtgaaatcacactttggtctgtaaacatatttagctttgcttttcattcagatgtatacataaacttatttaaaatgtcatttaagtgaaccattccaaggcataataaaaaaagaggtagcaaatgaaaattaaagcatttattttggtagttcttcaataatgatgcgagaaactgaattccatccagtagaagcatctccttttgggtaatctgaacaagtgccaacccagatagcaacatccactaatccagcaccaattccttcacaaagtccttccacagaagaagtgcgatgaatattaa

SEQ ID NO: 1399 - DNA, 196 bp, homo sapiens
  misc_feature (89)..(89): n=unknown
ctgggatggaggcacccaggtggcagaaggggagaagaactgtgggtggacgtgcagggagagcagctgcagctggcactgcagtgggngctggcccaggagacactggctgccgttcaccattgcagcaaagctttatcaagcgcacactgggcagccatggggcgggtaccacggccagtaacgagcaagaagg

SEQ ID NO: 1400 - DNA, 329 bp, homo sapiens
cttggctgtcgctgaggatgtgcagggcacacagcagtctctctagtaccatgtgtcccagtccagagaggcaggaggatggagctcggaaggatttcagctccaggctggctgctggaccgacttttcaacattttttaaaaagtgcctcagctcctcaggagaagctgtcttcagaagtggaagacccacctccctatctcatgatggatgaacttcttggaaggcagagaaaagtctacctcgagacctatggctgccagatgaatgtgaatgacacagagatagcctggtccatcttacagaagagtggctacctgcggaccagt

SEQ ID NO: 1401 - DNA, 524 bp, homo sapiens
tagcagctttaaagagacacgttttccactgacataaagttgcttcgccccttgcagcttatctccaccttcatgacctgtttcctcagtggcaggcaatgtctccccttcctgttggggaggattgcccaagtcagctctgaggccatcctctcaggtcagcaatatgcagaagagtccctcagagtggtcctgcagagaacatgtcccctaagtgtctgagaactggctgaggtgatcttcaccagcacatagtccccaggctgggctctgaccctgagcccagggttattgacatcctccatctctgcatcagggaagatcaccttaaggtttccatcattcctgccacacaggtcagtggcagagcgtttactgagcccttccactagcaccaactgggtacagcccacagaggtctgattggcttttgttgcttcttctcggaagatagtgatgagttcctccaaacgcttaattttacctcttccgggacatcatccttcagcctatgatatgccgtg

SEQ ID NO: 1402 - DNA, 337 bp, homo sapiens
  misc_feature (315)..(315): n=unknown
gtccctgagtaggtgaggaggtgggtaggagcttgcttatagaaaagtggaatcgagtagtccttgctggtggagccgctgccgccagggaactcagggccggctcctgttccttcaagagtgctggaggccaaacttgaaatacaagtttaatgttcctcgtcgggcaaaagataaggatccgatctcccccggcccggtgtgcagcaggagcgaccaaccccgacccgggttaaaactcccagggactcttcgctgctgccacctcttgttctctcccccgttcccactcggggtctccctcagggccgggangcacagcggtccctgcttgctg

SEQ ID NO: 1403 - DNA, 103 bp, homo sapiens
  misc_feature (2)..(94): n=unknown
tnacacctgangtacattcantcctcaacatcattgataggttcttggaaactgnagctttaagtanaacaacatnttananaaccaactgctnttgctcatc

SEQ ID NO: 1404 - DNA, 530 bp, homo sapiens
  misc_feature (482)..(482): n=unknown
gaatgggacttcggccttgtcaggagttgtcttcatctgcagcacgtttcttcctcctgcagtagatcttagctaccccagatatctctatggagagaagtttgtggaaaatgctttgcttcgtggcagagtctgatgctgtaggaaaaccttcgggcatgtgacagcagtgtggtccactccctgttctgccctggcgctcagagtcatgtgtaagtaggaaacctgagcaagtcttccgtggaggaccctgagctgccgtctttgggatccttcctgtgtccccaccgtctttcatttatttgctttcctgggcctctatctgggccctaccttgagcttctccagttttattcaagccaccagagtaagaatttgggtgtagatgtcacaactaccttctactcaattcaccaattcatttactgctatggcacgtctcaggaataactctagaaacctctaaatcgaaatattataanatcttgagcacttagtcctgctggttttagttagaaaggcatccagga

SEQ ID NO: 1405 - DNA, 453 bp, homo sapiens
  misc_feature (250)..(420): n=unknown
cccacctgtcctgcagcactggatgctttgtgagttggggattgttgcgtcccatatctggacccagaagggacttccctgctcggctggctctcggtttctctgctttcctccggagaaataacagcgtcttccgcgccgcgcatggagcctcccggccgccgcgagtgtccctttccttcctggcgctttcctgggttgcttctggcggccatggtgttgctgctgtactccttctccgatgcctgtnaggagccaccaacatttgaagctatggagctcattggtaaaccaaaaccctactatggagattggtgaacgagtagnttataagtgtaaaaaaggatactttctatataacctcctcttgccacccattactatttgtggatcggaattcataacatgggctacctggtntcagatgaaaggcctgttatagagaaaactgtc

SEQ ID NO: 1406 - DNA, 506 bp, homo sapiens
cattttttaaaaaatgagcaataaagaacctctatcagtgagacttctcattttatagcaaatacatttttgcagcttaaattttcttgaattcatatacgcttctgtcatttaaacaaacttccagagaaaactggtctctatatatttaagtaacaaatttgacaaaatacatatttatacatatatagatctctaatataaatattaaatttgaaaaaatcaaatgtgaagcagaaactgctatacaagtatattgtataatatttattttatacattaaagtatttggttgaatatacttcaattaggtttctaaaaaacaccattatctgcttcttagtaattgcgacattcttgaaaagcatgtgaaacgggtataaacttcaactctgtgcttaattcagaattcctgtttgttctcctcaaacttttatcttcctaaagcatcttgccagagactacaaagggaagggacatttacagagcactataaacatgtcctt

SEQ ID NO: 1407 - DNA, 336 bp, homo sapiens
  misc_feature (180)..(180): n=unknown
  misc_feature (325)..(325): n=unknown
agcaataccagaagtaaagggaaatatcagacaatattttattattttttcatagatgttctgccacacaaagaacttggggtgtaaggataaggcaaaagctccaatcccatttttcagttctcctaggatgcacccctcagggagcctggccagagttccgaggcccgtgagcgtcantgttgctttattttccatcaaagccctctgagaagtgagacctcagcaattccgggagccacatagagacagacttggcaagggaccccctggttctgagccagtagctgccatctggaaattcctcttttagctctccttagangtgatgtgaat

SEQ ID NO: 1408 - DNA, 340 bp, homo sapiens
gacttttctagctgtatgactgttacttaaactatctaaaatagagcattttggtatctttcatctgaccatccatatccaatgttctcatttaaacattacccagcatcattgtttataatcagaaactctggtccttctgtctggtggcacttagagtcttttgtgccataatgcagcagtatggagggaggattttatggagaaatggggatagtcttcatgaccacaaataaataaaggaaaactaagctgcactgtgggttttgaaaaggttattatacttcttaacaattctttttttcagggctcgagccgaattccgagcttggatcctcta

SEQ ID NO: 1409 - DNA, 421 bp, homo sapiens
  misc_feature (329)..(364): n=unknown
cttagccaaaatgattaagtgttccttaaaattaagttgaaaaaggaaatattctttctcataaaactgtgactaggcatacactgtagtttttgaaaattatgcaaaagcagctaaatgtaacttattccaagtgcatttttcttatttatatctttatgtagcactactacagaaattctgcaagtttctgtttcaaagcacaataactagtaataccaaagactatttcaaaatgtccagatgtaggggaagagatgtttacagtatgatgaaaataattttccaagtaaagtgaagtttgtgtgttttgtacacttagggatatntntntatagctacattcacacactcacaatttaanatatttcccctagttttttggggggataggaagaaagatttgttactgtattttttt

SEQ ID NO: 1410 - DNA, 437 bp, homo sapiens
  misc_feature (165)..(432): n=unknown
agataaaaaaataaggctttttgatgaaaagaatccattacaaagtcaaaaatccattacaattataattgaatcagtaacaaaatttagctttaaatgagtcaagtattctgcatttgaaatttaatatcacaaacattcaagattagtgaattttggtaaganaaaaatactagaagaaaggaaaaaggacaccttttcaacagatagtaattnataaaaantttttnaaaagtgctntgggaaaacacacagtatcatnacttaagaaaagtcattnaaggaaganttaagtgcntcaagtggagtgnattacagactaaaaaangttttaaaatttgccaagaaanttaagtgttaaaannactcntcncantattcagnttcatgtttaaggaaacanttgacaganaagtaaaccaaacgcaananaaagt

SEQ ID NO: 1411 - DNA, 470 bp, homo sapiens
  misc_feature (18)..(61): n=unknown
  misc_feature (375)..(419): n=unknown
gctgaggcggtgtatgtncggcaataacatgtcaaccccgctgcncgcnatcgtgcccgcngcccggaaggccaccgctgcggtgattttcctgcatggattgggagatactgggcacggatgggcagaagcctttgcaggcctgttaggcctgttacattaaatatgaacgtggctatgccttcatggtttgatattattgggctttcaccagattcacaggaggatgaatctgggattaaacaggcagcagaaaatataaaagctttgattgatcaagaagtgaagaatggcattccttctaacagaattattttgggagggttttctcagggaggagctttatctttatatactgcccttaccacacagcanaaactngcaggtgtcactgcactcagttgctggcttccanttcnggcttcctttccacagggtcctatcggtggtgctaatagagatatttctat

SEQ ID NO: 1412 - DNA, 136 bp, homo sapiens
  misc_feature (11)..(127): n=unknown
gagaataaaancctggtcccaaaataaaagggccattaattgaaganaacgattntacttttttttnacaannaacagtattatccctantantangaataannnaataccacctnattcttattangtattataa

SEQ ID NO: 1413 - DNA, 499 bp, homo sapiens
  misc_feature (33)..(428): n=unknown
ggctctggtcttcgatgcacaggagtggccgtnatggaacgcagcagcagcgtgcagggtcaaagacagccggccccccatgtcagtggtctaggatggccagtnaaggcaccaacatcccaagtcctgtggtgcgccanattnacaagcagtttctgatttgcagtatatgcctggaacggtacaagaatcccaaggttctcccctgtctgcacactttctgcgagangtgcctgcagaactacattcctgcccacagtttaaccctctcctgcccagtgtgccgccagacctccatcctgcccgagaaangggtggccgcgctccagaacaatttcttcatcacaaactgatggacgtgctgcagcgaactccaggcagcaacgctnaggagtcttccatcctggagacagtcactgctgtngctncgggaaagccctctctcttgcccaaaccacgatgggaatgtaagttgctggggatggcagatactggcccg

SEQ ID NO: 1414 - DNA, 586 bp, homo sapiens
agttctgtttcaatctgtaatctctgatgtacccaaagcctccccaaggccacagtagtcatgctcccgggcagtatctgccatcccagccacttacattcccatcgtggtttgggcaagagagaggctttcccgcagccacagcagtgactgtctccaggatggaagactcctcagcgttgctgcctggagttcgctgcagcacgtccatcaggtttgtgatgaagaaattgttctggagcgcggccacccctttctcgggcaggatggaggtctggcggcacactgggcaggagagggttaaactgtgggcaggaatgtagttctgcaggcacctctcgcagaaagtgtgcagacaggggagaaccttgggattcttgtaccgttccaggcatatactgcaaatcagaaactgcttgtcaatctggcgcaccacaggacttgggatgttggtgccttcactggccatcctagaccactgacatggggggccggctgtctttgaccctgcacgctgctgctgcgttccataacggccactcctgtgcatcgaagaccagagccctcgagccgaattccgagttac

SEQ ID NO: 1415 - DNA, 374 bp, homo sapiens
cggagatcttcaaaaaggagcacccggaccgcttcatcgagtgctacattgctgagcagaacatgcacttttgcagccttcttcacgcgggcctttgaccagattcgcatggccgccatctccgagagcaacatcaacctctgcggctcccactgcggcgtttccatcggggaagacgggccctcccagatggccctagaagatctggctatgtttcggtcagtccccacatcaactgtcttttacccaagtgatggcgttgctacagagaaggcagtggaatagccgccaatacaaagggtatctgcttcatccggaccagccgcccagaaaatgccatcatctataacaacaatgaggattccaggtcggac

SEQ ID NO: 1416 - DNA, 441 bp, homo sapiens
  misc_feature (37)..(37): n=unknown
tgagcacctttcccagaatctcaggaatgtatagacncccgccccacacttcatacccgccctaggccttggtgatgaggcccctcacagcttgtgcaatggcatccctgtcgataccaaacatcttcagcagctcagccggcttcccacttcttggtacccggttaactgccaggtgggtgacagtgatgccaggctcgcccactactgcactggacacagcctcaccaatgccaccttcataataatggtcctccacggtgaggatcctgcccttggtggcacgagcgctgtcgagaatgagttttctgtccaggggcttgatggtgaaggggtccagcacgcggatgttgatcttttctttcttcagcagttcggcagcggccaaggcctcgtgcagggtcaccccagccccgataacggtcacctggtcatccttgc

SEQ ID NO: 1417 - DNA, 406 bp, homo sapiens
  misc_feature (232)..(250): n=unknown
ggaaagcccagccatatccccagtttgacttgaccagtagtaaaactagcactacagtttgatccctttttacctccttgaatatcttcaattcatcaaggatctgtaaagaaggagaggtacaagatatatgaaacccaaatctcaaaacaatgatttagtgaatttcccatgaactttaaacagtgattgcttcaaaatttccaagagccatactctccctccagctgcnnnnnnnnnnnnnnnnnnnaaatgcacactattttaacctaaaatggtgccctgtggctgccattctctaactcttgcatacttaaacatttattcttggtcaaattaaaacctcatgcatttccaaagatataaatgccttgcctggagaagttagatcttgcaagtctcagga

SEQ ID NO: 1418 - DNA, 265 bp, homo sapiens
tcagacagggtggttgaccaaaagtgatcttatattgtttacaaaaggcaaacccttcacaagaaacaagaggtattttgagttcacaatcagtccagtgaagcaatattatgctaagaaggatgttcttctgtttgctactcaacattgaagatgtgaagaatgagaacatttggctggaaacggcacctaatgaaacaaacacccactggtgggacataaacagctataggcataagacaaaccatctcggccctcctgagac

SEQ ID NO: 1419 - DNA, 407 bp, homo sapiens
  misc_feature (67)..(105): n=unknown
gtttctgtttgggatgaacaaattctggaaatggatagcgatgatggttgctcaacattttgaatgnnnnnnnnnnnnnnnnnnnnnnnnnnnnnnnnnnnnnnnggtaaattttgttatgtatattttatcataatttaaaaaatatatctagaatgggcaagaaggattctcctcattcctctcttgacttgagaatgatcagtcaataggccctgaagtctgaatttgtgaaaatttccttgggtgacaaacttgtttgattactctatttagtgtatcccaaagttattaccacataatcttttaaacaataaaacaaataccccttagaaagtcttctgcaaacccatttctgaaaatggtacattatagggtgggtatagatgcatagatatgggattatg

SEQ ID NO: 1420 - DNA, 549 bp, homo sapiens
  misc_feature (268)..(295): n=unknown
aaaatatacataacataaaaccttttaaccatttatttttaaacattttaagcttcttattgaaatataacaatataggaaacacatacacagtacaacttgtaagtacactgctcaatcagatttcatctggatcaagaacagaatattccaatattccggaaaagaaaagaaacatgttaaaaagaaaagatttttatttaaaaaacctagacatagtaattaaaatgggggttaagagaggtaatctctctatccctttgtgtgnnnnnnnnnnnnnnnnnnnnnnnnnnnnatcccatatctatgcatctatacccaccctataatgtaccattttcagaaatgggtttgcagaagactttctaaggggtatttgttttattgtttaaaagattatgtggtaataactttgggatacactaaatagagtaatcaaacaagtttgtcacccaaggaaattttcacaaattcagacttcaggggcctattgactgatcattctcaagtcaagagaggaatgaggagaatccttcttgcccatttcta

SEQ ID NO: 1421 - DNA, 447 bp, homo sapiens
  misc_feature (92)..(92): n=unknown
  misc_feature (275)..(435): n=unknown
ctgtccctgagctctacaacagaatattctggaacagtttcctcattagccctgtgaccccagcacacgcagggacctacagatgtcgaggntttcacccgcactcccccactgagtggtcggcacccagcaaccccctggtgatcatggtcacaggtctatatgagaaaccttcgcttacagcccggctgggccccacggttcgcgcaggagagaacgtgaccttgtcctgcagctcccagagctcctttgacatctaccatctatccaggganggggaagcccatgaacttaggctccctgcagtgccccagcatcaatgganacattccagggccgattccctctgggtcctgccanccacggagagacctacagatgcttcggtctttcccatggatctccctacgagtggtcaaaacccgagtganccantgcctgtttctg

SEQ ID NO: 1422 - DNA, 499 bp, homo sapiens
gtgtgagaataacacaagctgtcactgcaaatcagtagctaaaaatgctttgtctggttaatgtgaacatttaatatttggctcaattaaaaattaaccgatgaaagtacatgtcattggaatttgaaaataccttttgtacggaatacttaaagggcatcacccatgactaaaccagtgcttttaaaatatggagaatatggggaaatttaatatgagttgggatacttgactcttttttaaaacctctctacctgtttggcacaacagggtattgataaagagtgggctcattgttatggcaaaggattcacttgcatctctgtgtttttaagtgggtaattgtttttttgcactcagtcacatgattaaagcagacagaccaagagatcagttattcatttataccatacttttaaaaaaatattgagccaggccctggggaagtgggaagtgagagccagagcggcgtggctgatagtctagggcagtgctatcc

SEQ ID NO: 1423 - DNA, 428 bp, homo sapiens
  misc_feature (266)..(368): n=unknown
aaaaaatacaacaatcttgcgcttgttggatcagtgttctagaaatgtcaataggtcaaattagttaatgctgttatttagttctatggctttactgattttttttccacttgttctatcaattactaagacagacggattaagtcttcaactatagtagatttttctgtttctccttgcagttctttcagttttcatgtattttgagggtctttttaaaaatgcatacacatttaagatttttatgccctctttatgaattaatnnnnnnnnnnnnnnnnnnnnnnnnnnnnnnnnnnnnnnnnnnnnnnnnnnnnnnnnnnnnnnnnnnnnnnnnnnnnnnnnnnnnnnnnnnnnnnnnnnnnnnnagtgtttttatgacacatatttttatatgattttactttttatctatggcctttatgatt

SEQ ID NO: 1424 - DNA, 365 bp, homo sapiens
tgtggccagtcttaaagctagtttttgctatgtggaacatgctgctctaattcagatttaaagagtttcttcctgttaattcgaagctcactgtgcctcttgtttccgagggaagaaggactgattaagtcatctaaatggatgcaatactgaattacaggtcagaagatactgaagattactacacattactgggatgtgatgaactatcttcggttgaacaaatcctggcagaatttaaagtcagagctctggaatgtcacccagacaagcatcctgaaaaccccaaagctgtggagacttttcagaaactgcagaaggcaaaggagattctgacccaatgaagagagtcgagcccgcttatg

SEQ ID NO: 1425 - DNA, 338 bp, homo sapiens
gcttgcagccatggtgcccagtctggccccaccaggagacaccagaacgactgtccatgtgtctactccttggcaccttccccgcatggtgggtagatgggcagggaggggtgggaatctgtgtaaccgtggaagggaacggccctcagacccagagggtttggagcctggggtattgtcaccgacagtggccttagcctagctagcacagttagtgctgtgcatcacagcatagcttttagaggcaggatttgtagtcagtatagttgggaggcaccatggagcagggatcaccctccaactcattgacaaggagataccaaactatcagttcatag

SEQ ID NO: 1426 - DNA, 393 bp, homo sapiens
  misc_feature (276)..(282): n=unknown
aattattggggcagctactaggcatcatcaggtgcagtgttaggtggttttcattcattaatctcttataatctattcaaccctacaagataggtgttatacaggtatgaaacacgtgtttacagagaaagaagatggctttgccaaagtcacataactgattaagaagcagtttgaatttgaagccagactgacaggacttcaaagtgcttgacatttctgctacccctgcttcatacatatggaaaggaatagagagcaatgatacagactttnngggangggatgactgtatgtgtagaatatcgagaagaatattggaaaaaggaggatatttcccagtacctcttctcatgttgagatcaaagtgctcatagaacaatgcctctgaga

SEQ ID NO: 1427 - DNA, 262 bp, homo sapiens
aatcaattggttatatttgtgtaagtcgatttctccatgacttcctccttccctggggttcccctttttacttttccagccacagagatgagacattagaataggacgtacttcctgtgactgcttgcatttcgggccaagaggcagaaagacagaggaaaaaagcagcagatgtttgctcctacatcttgagatcagagctcctctgatcagagaggaaggttcctttccctcagagtatatgtgactgttgtccccgctg

SEQ ID NO: 1428 - DNA, 446 bp, homo sapiens
  misc_feature (413)..(413): n=unknown
gagctcagcttctggttgtattctccatgagtttaataatgacatgaaaaaatgtggaagccgagagagtaaaatactctgccctgtaaaaacatggaagacatgcaaacagaaaaaaaataattgtattgttttagataatacttaagacaactgtgaaacaacaaaaacacaactattcctttgtgaccgatgaagataaaaagaaattctggtaaagacaggtatgcagttttttaaaatgggttaagaaattgttgcagaagaatttctaacatctgaaaatggttttatgtttaagaaggatggtctgaattgtgtactaatagcaaggtataagtttggtgtagagcctatccagtagcgtccactgtaccacttttaagtaagactcagtccacagaagctggaanattgccttcgctttaaaatatcctttaccttct

SEQ ID NO: 1429 - DNA, 370 bp, homo sapiens
ctttgaggtgtcagtgaaggtgatttggtcctcgcaattaccctttgagaaaggtagtattacctacatttgttattgggaaactaaggtttgaagaggttggatgacttgcctaagactacatagccaagaaagggctgagcctgagcttgtgccagtattttgactcctaaagctgtgcttttaaaaccataccacatgtcctgtgtgctgaatattcgatgtggaaccaagctaaccaaccttctcaacacacgagttctctgcctcccttctccacacacacctgtctgccaagttgtctgctctgatagtcaaacaaatcctaaaatctctttttgtctaagacttcatgaaagtagaaaggtga

SEQ ID NO: 1430 - DNA, 449 bp, homo sapiens
gcacttgggaaatgcctcttgggaaggtgacatgtaaaaatggtggtcaacgccacttctgggcaggtgccaaggcctgtagcagcctgtgtctttgggtcctgcatgctttcctttgtgttggctggttcctctggctgagttcactgttggtctgtctgtggcaattacggagaagcatgacagtcacagcttccctgagttctactgaactcatgaactttgttcataacagactctacaagtggtacaggattcctatggccacaactcaactcaactccgtagaaatcaatgtttatggatcattggagctaaaagaaaacttgcagatcagatcatctcatccaattccctgactttacagaatgaggaaactgaggcacagtaagatttttttttttaattttttgcccggtctgaataaaattgaaggcacccttaaccat

SEQ ID NO: 1431 - DNA, 270 bp, homo sapiens
gtatattagacaaggaaaataatggcatatgaatatgttaaacaagttataggagatttgaaaactaagcaaggaacaaaaagaacaaatggaaaacttgaacataaagcctagatgattctatgaggccatgctggacctgactctcaaggctctgagaagcagttcatattcttgctgcttattaatgttgctcacctttcaagtgcagactgccaagtgtcatgaattagaaatgaaagaggaaagagggaaggtactaaattatag

SEQ ID NO: 1432 - DNA, 385 bp, homo sapiens
  misc_feature (145)..(145): n=unknown
  misc_feature (332)..(357): n=unknown
gtccaaatttcttgtagactgatatgcatacctgatcattatatcattttttttcccagagttttcttaaaactcaaatattgaatacctaatctttctaagctaagaggttggaattctggggaacccgtttataaaaatgaanaggggtattaattacatcaacatgctggccataaggttaaaaacattcacaatttccccctcataattttgaagcttttatacacaaggattgaaaacctttaaaacttaagatctgcgtgtctagtttaaggctctataaagagcacttacccaaaggaggttactaatatgaattaatttaaaananacatggtttccacaacaaacganaattcttacagttgaaaccaatttactc

SEQ ID NO: 1433 - DNA, 482 bp, homo sapiens
  misc_feature (456)..(456): n=unknown
cacagaaggtgagatcacagctctgctggcagagattactagcccttggctctctcgtttggcttgggtattttatattatttctgtcataacttttatctttagaattgttctttctcctgtttgtttgcttgttagtttgtttaaaatggaaaaaggggttctctgtgttctgcccctgtaattctaggtctggaacctttatttgttctagggcagctctgggaacatgcgggattgtggaattgggtcaggaaccctctctggtattctggatgttgtaggttctctagcagtctagaaatggatacagacatttctctgttcttcaagggtgataggaaccattatgttgagcccaaaatggaagtaataataaatgcctcctggaggctgtgggtgtgggggattctgtatctggattccgtatcactccaactggaggctgtgggtgtnggggattctgtatctggattccgtat

SEQ ID NO: 1434 - DNA, 445 bp, homo sapiens
  misc_feature (385)..(394): n=unknown
agcgcacggctgtagactgtgctgaacagaattcaaaaataatggaattgcttcaggtggtaccaagctgtgttgcttcattagatgatgtggctgaaactgaccgcaaggagtatgtcactgttaagatcaggaaaaaatggaactcaaaactgtatgatctaccagatgagccttttacaagacagttttactttgtccactcagctggtcagtttaagggaaagacttcaagggagattatggcaagagatagaagtgtccctaatttaaccgaagttctttgcatgagccagggaggcaaagtgtcacactgagacagaataacctgccagctcagagtggatctcatgctgctgagaaaggcaacagcgactggccaganaggctggnntgacacagactggccctggacacagacggatgctgcggagacacacggtag

SEQ ID NO: 1435 - DNA, 499 bp, homo sapiens
  misc_feature (492)..(492): n=unknown
agagagatggtggtggttaacttttttgttgcattctttcctgccacagaaaagctttcaggaacttggtgctgaagacttctcaagccagtctcatggaagcacatttagttctcagatgtgttcacgctcagcatcatcttgttgcatccttgcttcctagcagtgggttcaacaactcctcattcctgttaggaccgggaagcactaacctcttggggagtggagagggggccagcagcctccgggccctgggacacgaccgcatcctctaccgtgtgtctccgcagcatccgtctgtgtccagggccagtctgtgtcagtccaggcctctctggccagtcgctgttgcctttctcagcagcatgagatccactctgagctggcaggttattctgtctcagtgtgacactttgcctccctggctcatgcaaagaaaccttcggttaaattagggacacttctatctctttgccataatctcccttgaangtctttc

SEQ ID NO: 1436 - DNA, 467 bp, homo sapiens
gccagtcagagaaggaagaggatgatggccttcggaaatccctggatagattctatgaaatgtttggtcatccacagccaggctctgcaaactcactctctgcatctgtctgcaagtgcctgtctcagaaaatcactcaactaagaggccaggagagccaaaagtatgccctccgcagttttcaaatggcccgggtgatcttcaaccgggacggctgctccgtcttacagaggcattccagggacacccacttctacccactggaggaaggaagtacatctttggatgatgaaaagccaaacccaggactgtcaaaggatattactcatttcctcttgcagcagaatgtaatgaaagacctgtaactggtgccgggcagtgtgcagggtagtaatggaggtgctgtgccatgaccagcagtgttggtggccacccagattccctagggtctctggccagctctgtgt

SEQ ID NO: 1437 - DNA, 442 bp, homo sapiens
  misc_feature (385)..(418): n=unknown
gccggggtgcgcacttgggcccccctggccatggcggcgaaggtggacctgagcacctccaccgactggaaggaggcgaaatcctttctgaagggcctgagtgacaagcagcgggaggaacattacttctgcaaggactttgtcaggctgaagaagatcccgacatggaaggagatggcgaaaggggtggctgtgaaggtggaggagcccaggtataaaaaggacaagcagctcaatgagaaaatctccctgctccgcagcgacatcaccaagctggaggtggacgccatcgtcaacgccgccaacagctccctgctcggaggcggtggcgtggacggctgcattcatcgggccgccggcccctgcttaccgacgagtgccggancctgcagagctgtaagactggcaagccaagatnaccggcggtatcggctcccggcca

SEQ ID NO: 1438 - DNA, 370 bp, homo sapiens
  misc_feature (224)..(358): n=unknown
gggcctactgaccagcaaggaaaacataatccaatgcttgtggtcagtactgaatgacttggccctacgtctttgtgtcttttaagaacggtccaatgggtctgtcataacacttcaaacatctgcttctcagtcctagtttatgctttataagccaattcccattggtttaaatagtttctgtgcctttaatatgactgtctatatggattaatagtaatgancacagtnatgtggtgataatganaattttctacttagaatttggntaaattcaattgancttnataaatgttctctgaagtctaggttaagaaaaatagagaaatgaatgtggtagtctggcaancatcttgcncatgtctggcaa

SEQ ID NO: 1439 - DNA, 363 bp, homo sapiens
ttgccagacatgagcaagatgattgccagactaccacattcatttctctatttttcttaacctagacttcagagaacatttatcaagttcaattgaatttaaccaaattctaagtagaaaattgtcattatcaccacatcactgtgttcattactattaatccatatagacagtcatattaaaggcacagaaactatttaaaccaatgggaattggcttataaagcataaactaggactgagaagcagatgtttgaagtgttatgacagacccattggaccgttcttaaaagacacaaagacgtagggccaagtcattcagtactgaccacaagcattggattatgtttccttgctggtcagt

SEQ ID NO: 1440 - DNA, 94 bp, homo sapiens
aattttaaaaagttgaagtgaagcagacaaatttcatctgaaaatatatgaacattcctatctttaccaccaccctttactgaatcttttgatc

SEQ ID NO: 1441 - DNA, 73 bp, homo sapiens
gtaaagataggaatgttcatatattttcagatgaaatttgtctgcttcacttcaactttttaaaattctcgag

SEQ ID NO: 1442 - DNA, 427 bp, homo sapiens
ggtcagagtaaaagctttttatctctaaatattacttccctggaatattagatgtagcagaagtcagtaacggagtgacctttctcttaaacaattcatagattcactgaaattttcttcaactttaggaaaattaaatatattccacagtgctgtaagtcttaaatattgattttcctctgaaatcttgactcatcctacccaccaacattctccctttgtacactatgttctttgtaatgttcatgttacacaagtgaaaattagtaacattagtaaattttcattgcaggtttatttgttcatatttctggatatataatccattactgttaaacttcatatcaatgttccgatatttcttcatcttatgttttatgttacaaaacaggttatttcactatatgtatgtttaattggttaattc

SEQ ID NO: 1443 - DNA, 475 bp, homo sapiens
  misc_feature (408)..(450): n=unknown
attttaccacatggtatgaattagtccaagtgtttttatactaaatttacataatatacacttttcaagtaagtacaaagaggtataaacactgcttatgaattgaatgttaaaaaataaatctctatgcattacttttgtctttccccataatctcacgtatacacataaaacaaaaaacaaggagacccaattatagttgtggtatctgctgtttctgccttgaaatttccagcttacagctaagcaacaactactgtgcatccagaacttacatctatgttcctagagtacttgaaccccattctcaagtgcacccttcttaccaggtggaaatagttcactgctgtaataaatctaagaaaacattatgtttctctctacttttttttctctcatataatctanggcaatttctccctctgtatcattttcctgagaaaaactaanaataaatttttaatccaagaccaga

SEQ ID NO: 1444 - DNA, 484 bp, homo sapiens
  misc_feature (67)..(152): n=unknown
  misc_feature (377)..(377): n=unknown
aaagaataaccatatccttcatggtggtgatggatagaaggagaaggtagatttgttactagtagtngtggcttttttgtttgttttgggttgttgtggggttttgtgtgtgtgcgtgtgcttgtgtatatgggttttggtttgttttagtngtggtatatagggcactttttattttattcattttatactttggcttaagtgcttggtaattcatattacaaaataattagagtgtgattcctccatccccttaatgggtgcacctaaaacatgaataccagctaatagtccatgtgtccctgggcacacatgggaagatcgttacctgatgtgcagcagtcggcatagcttggctgatactctctatagaagtncattcagagccactcagtctgaacttggcagaattgccccatatcccagtattcagtgtccagcctatctattgtttggggcctacttcctcactctgacaggtgag

SEQ ID NO: 1445 - DNA, 186 bp, homo sapiens
  misc_feature (37)..(149): n=unknown
cactctgtcaccaggctggaacaattttaacacagagcattgtgtaaggacttgctgtagcagaatctcacaaatctctaccaccagctattgggtngggagtggaagtgggttgggctanatccccatagangatagcaggggcaganctagggcagccagagtgttgcttctcacctgtcagag

SEQ ID NO: 1446 - DNA, 417 bp, homo sapiens
ctgggaagcccagtttaaatcagactgccctggtaagggttaagcttgaggatgaaaatgacaacccaccaattttcaaccagcctgtaattgagctgtcagtttctgaaaacaaccgacgtgggttatacttaacaactattagtgccacagatgaagacagtgggaaaaatgcagacattgtttatcagcttggaccgaatgcctccttctttgatctggaccgaaaaacaggagttttgacagcctccagagtatttgacagagaagaacaagaacgattcatttttacagtaactgccagggataatgggacccctcccctccaaagccaagcggctgtgattgttactgttctggatgagatgacaatagccccaagtttactcataatcattttcaattttttgtgtctga

SEQ ID NO: 1447 - DNA, 459 bp, homo sapiens
  misc_feature (445)..(445): n=unknown
ctattaagtatcgaatttaatatattacaataaaataatttgaaatcaaagagaagacttcctatatggcttagttgcaatctatcaacgatcatgtgcttcacagctgatgtacatttaatattctactatcctgtttagagactaaaaaaaaaattaacccctttagcaaccatagctgcaacataattgcagtcacaccttcaaaagtcattgaaaacttgagatttgaaggtgactttttagatcaaaaggtaaggtgaaagtcttgaagcagtcaatttggaaacccccaggagcagaatttggcatatcaggacaggttttttcttcttcagcaaacattatcttgggacattttggaataattttctcttttcatcttttgccatttgaaggaaactgaaaggagaaaatattctcagaactcaggaatttcaaagcngttctaaaaattct

SEQ ID NO: 1448 - DNA, 483 bp, homo sapiens
gcactgtaaatgtaatgcatttgtgaaaacattttttaaaaaactacagcttagaaaataccagaggcctcatactaaaatatatttttgcaagtgaagtaaatataaaaataatttaatccaaaattaagtctatataaatatcagagaattcacagtagaaatatctaaggtactgacacttcagacattgctgagtatagaatcagaatgctgagtatagaaaataatttaaaactaaagttggtaggtaaataatgtgtatataactttaaaagaagtagaatttttttgtagatgtataattacattcaaattatattttttcttgaaaaattagtttttgaaaagcaaataatgatgtaattcaactcaaattcatgctcttcatcctattgtattcacatgtgaaagccatgtggattaatttttcatgcatcaaagatatgagaaatcatttccggttagggcgggattatttat

SEQ ID NO: 1449 - DNA, 467 bp, homo sapiens
  misc_feature (214)..(461): n=unknown
aaatgatatactactaattcactttaattttaactaagattaaaaatggttttctcttactataatgcagaagaatattgctctgaaaacctacttcatggatcactcaatattataagttaaacacaaacagcctcttcactcaggttttcatcatgcatcttacattttaatgtccttattctttcatagaaagtgtcataaataataccgnccnaacagaaatgntttcctcatatcnttgatgctgnaaaattaatcncatgctttcacatgtgaatacnataggaatgaagagcatgaatttgagttgaattacatcnttatttgcntttcaaaaactaatttttcaagnaaaaatataatttgaatggaattatacatctaccaaaaaattctacntcntttaaaggtatatacnccattatttacctacccactttaggtttaaaataatttcnaaacct

SEQ ID NO: 1450 - DNA, 421 bp, homo sapiens
  misc_feature (401)..(401): n=unknown
gaataagaaagtggggagttatccaagacgaattgcagagcaaaaatcttcaggttttaggaaatgattgacagaagtgggcaaagacaaagtaaaatctaagataacctggtgcttctgagtctgattgcaggaggttggtagccacacggtaagggaaaggaggcccctaaggtgctcattgtcaggtttgtgcaagtgcagagttggcacctgagaatgagtgcctttttaaattgtgagctgggcaccttgcagtccagtccctaagttccctgggtaccattggcaggagtaccagatagatgtcagaggaactgaggaggaaagaggtgtctctaattttggacaagctgaatttaagtgtttgaagtgtccaaagaaatatgtctagcaagacnattaaaatactgtttctaat

SEQ ID NO: 1451 - DNA, 391 bp, homo sapiens
  misc_feature (233)..(335): n=unknown
ttctttggacacttcaaacacttaaattcagcttgtccaaaattagagacacctctttcctcctcagttcctctgacatctatctgtactcctgccaatggtacccagggaacttagggactggactgcaaggtgcccagctcacaatttaaaaaggcactcattctcaggtgccaactctgcacttgcacaaaacctgacaaatgagcacctagggggctcctttcccttancgngtgggctacnaacttcctgcaaatcagactcagangcacnaggtnanctnngatttnacttggccttngcccanttcgggnantcatttcctaaaacnngaagatttggctcggcaattcgtcttggataactccccactttcttattcctcgag

SEQ ID NO: 1452 - DNA, 434 bp, homo sapiens
ctctgatgtagggaagaaatagttagaaacatatctccaggatgtcatggaaggaactatgagtaatcctctgtaaccctctgcatgcagctgccatttctgcttattattaccactgaattaacacaggtacacgtctccttttaaaaaaacaatacaaaggaaatctgagtccatgaagaaagaaattagaagctgttattcatactatagaagatttcttgactctacagaagtccttctatgtgattgttttatgtgggttttcctgacgtatttcacaagcagtgtgatttacaaagcttcagcttatattcagattcaccaccatttatagtctgtgacatcctgatagctagactagtgaatattaagctacgtatgcagagaggcaggaaaactgactctgggggacatataaagcagttattgtc

SEQ ID NO: 1453 - DNA, 434 bp, homo sapiens
  misc_feature (208)..(248): n=unknown
  misc_feature (418)..(418): n=unknown
acgaataaggatttaactactatcattatgcagctaatgtcctaaacctacatcttcataatcaatccttctggagttccagatctaaattctcaatagcctagtggacatttccacacatttatttagggcaaatgggtccattcaacataactaaaactaaattccttacccttccccacaaaccagctcatgtcctcagtcagangnatcgatgntctcccacaactagaaacttcagtcatggnttacttcctcttcctcacacctgtctcacatatccctaaacaactacccttgccaagaatctcagtcctactgtgaatgcctgggttacgaacctactcaagatttgaacccagagtgcctatgaattcctccagttcctaagatctgcagccccagtccctagaagggntgaagaatgaggcagg

SEQ ID NO: 1454 - DNA, 493 bp, homo sapiens
gttgtttaataaggcacagaatacctgtagcataggtcagccttacgatgtccatgaattacatattcagacgttttagagcctgatacattttggaaaagaaaaacaacttctacacctattctacagtccgcatttaaaacaataaattcctctattaaaaacgtaaagccgggtttgcttgcgtgccacagggaatatatccaggaaggttattatgaagctgtcaaatcaagatgatggaaataaggcagtttgaacgaacagtcttcccacagtcaggccatttttgctgatttggtttagaattttcagaaatacttagtacactccacctgttctttgatgggaatatctaagaaggctaggtaggttcttagggttagcctgagtcatctaggggctcaactccttgtgaggggaaatgacagtgaacaagttagtactttgctccacaaatgcatgaaaggaccaatttgcatcttctatcagt

SEQ ID NO: 1455 - DNA, 509 bp, homo sapiens
aaaaggaagttaaatactgatagaagatgcaaatttgtcctttcatgcatttgtggagcaaagtactaacttgttcactgtcatttcccctcacaaggagttgagcccctagatgactcaggctaaccctaagaacctacctagccttcttagatattcccatcaaagaacaggtggagtgtactaagtatttctgaaaattctaaaccaaatcagcaaaaatggcctgactgtgggaagactgttcgttcaaactgccttatttccatcatcttgatttgacagcttcataataaccttcctggatatattccctgtggcacgcaagcaaacccggctttacgtttttaatagaggaatttattgttttaaatgcggactgtagaataggtgtagaagttgtttttcttttccaaaatgtatcaggctctaaaacgtctgaatatgtaattcatggacatcgtaaggctgacctatgctacaggtattctggggccttattaaaacaa

SEQ ID NO: 1456 - DNA, 234 bp, homo sapiens
  misc_feature (2)..(220): n=unknown
tncagctggagctggcgcaggngctggcccaggagangcccaanctgccagaggaccctctgctcagcngcctcctggnctccccggcactcaaggcctgcnnggacactgccgtggagaacatgcccagcctgangatgaaggtngtggaggtncnggncggccacggtcaccngtattcccgnaatcccangcctgctcancnnccatcccctgctgnagctgagctacacg

SEQ ID NO: 1457 - DNA, 383 bp, homo sapiens
  misc_feature (347)..(368): n=unknown
ctcttcatttgacatgctcacaaagaggagaataagacaagaaagcaagctaacccagaaacagtgaggtgacagtgcgcctcaaacacaggaaaataaaatgcataactatactgattggatgctgctcaaaatcagcctacatgccatctttggtacgtgtgaacaaagttaccaattcctattctaactatgatatactcaaaactgtacaatcagtaatgggatgctctaaagacaaaagaactgcaaaccctttttaaaaaattattttcagtaacagtgttactttttggtattaagattgtaagaataccttgtggataatgtgggacaaacccaatggntacttatgtggatggngatantctcaaattatccat

SEQ ID NO: 1458 - DNA, 397 bp, homo sapiens
  misc_feature (373)..(373): n=unknown
ttttatttaacttctatcttatttgtattgccttctgtcaccaccaagaatcttgttactctggaataccagggatgataatttgagaatatcacattcacataagtattcatttggtttgttccacattatccacaaggtattcttacaatcttaataccaaaaagtaacactgttactgaaaataattttttaaaaagggtttgcagttcttttgtctttagagcatcccattactgattgtacagttttgagtatatcatagttagaataggaattggtaactttgttcacacgtaccaaagatggcatgtaggctgattttgagcagcatccaatccgtatagtatgcatttaatttcctgtgtttgangcgcactgtcacctcactgtttct

SEQ ID NO: 1459 - DNA, 396 bp, homo sapiens
  misc_feature (355)..(374): n=unknown
ctctagtcaacactaggcaaagtaagttactttgagatccactaactcccctcccaagcctgcaggtaaaaccatcccagatcacctttattcctgctttagggtttaaaaaccccaggaggcaaacaaattaaagactgcagatgttcttaggatggttagacttgacacagaagagaaagaggtacaactgttcatagagttcagtttgacaattaacatgtatattagtatggttgcctgtgtttgtgttatgtttcactgtgtttcatcttcctgtgcctggggtcccccatgccctcctttcctatctctctcaaaaccagctgtttttccccatctgctgcattttggntatagatattattgtaagnttgctttaaaaccaaactcctc

SEQ ID NO: 1460 - DNA, 446 bp, homo sapiens
  misc_feature (440)..(440): n=unknown
gaggtctggtcccctgacccgtgccaaccccatagccatgacttcctgacagatgccatcgtgaggaaaatgagccggatgttctgtcaggctgcgagagtggacctgacgctggaccctgacacggctcacccggccctgatgctgtcccctgaccgccggggggtccgcctggcagagcggcggcaggaggttgctgaccatcccaagcgcttctcggccgactgctgcgtactgggggcccagggcttccgctccggccggcactactgggaggagcctaaagaaccctcctggcctccagctcagccttctctcactactatgtctgtccaacagaccggccagaatttagcttcacttgagagagatctggaatggtcgccatgattgaaaccacgcaccattacatcatcattacattaattacatcaacatanattatt

SEQ ID NO: 1461 - DNA, 314 bp, homo sapiens
ttttcccaaagaacatgagttcacctcagccatcaaagcagagggcgaaagctgcaagtgacaaggcaagaggctcctagaaaaatagattatacccaaggctctcctcctggggacccaaacccgtccccaggctccccctcagagcttgccaaatggagtgaaaggcatggaaaggggctgggagaaaagccagctccactgaacaaaggggagaggagcctggcagtgagcagacctgggaggggtgtggggtgggatgagctttgctccttggttgagtgctggaaaagggaagggggaagaaataattt

SEQ ID NO: 1462 - DNA, 51 bp, homo sapiens
cccaaaacagggaaccatatcacatttctttgattttaacttgcacagttt

SEQ ID NO: 1463 - DNA, 423 bp, homo sapiens
  misc_feature (91)..(92): n=unknown
  misc_feature (401)..(401): n=unknown
cttttgtaatgtacctttagatgggtacaaatcattaatgtacactttataagtcagtatctaactcgtccactatctgagtgtttatagnnttaaaccttattctcccaccctcttccaggtatgtgtgtgtgtaccctaaactaacaagtgaggaagatatattcctagaatctctggttggaattccaattgtgtcttctcacagaaactatattataaatggtatttaggtttttggtttttttttccatcaaactctgtagacattaaacttcagttatcttataggtctgttggggaggagaacaaaataatcattgtggtattgatttgataagaagacttgtttagataccaaacagtgaaataataatatttctaaattaggggttatcacnagctcagtatgaatagaccgtg

SEQ ID NO: 1464 - DNA, 431 bp, homo sapiens
  misc_feature (196)..(412): n=unknown
ttaggttaactagtatttccttttgcagtatttaacaaggggttaacctcatccagtctatttttcacctgactttgtatgagatgaaaaatctcatctctataaattcaatttcaattttctaatatcatctatgctgtcttcttctaccttcttggatatctggaatatatttataaaagttattttaccaggntgatcttntaattccatcatctgtcccatttctgcatctatacnaatgattatgttttctcctcattatgggtcaggtcagattttcttgtttctttacatgcctgataaatgtttgattggctgtcatacantatgaatttcatgtnntgtntgctggagtttttggtattgatnaaaaccgtgtngancttcatgtgtgatgcanttaaattancttgagataagtttgattc

SEQ ID NO: 1465 - DNA, 154 bp, homo sapiens
ggaattacatattcaccagtgtatctttagcacttaacattttaatgaatggaataattataagtgaactatatttttctaaaaacagaggcaaggttgatattaagaagaaaagttagaggatacataatgtattcctgactctgagatatat

SEQ ID NO: 1466 - DNA, 120 bp, homo sapiens
ttttcttcttaatatcaaccttgcctctgtttttagaaaaatatagttcacttataattattccattcattaaaatgttaagtgctaaagatacactggtgaatatgtaattccctcgag

SEQ ID NO: 1467 - DNA, 381 bp, homo sapiens
  misc_feature (14)..(149): n=unknown
  misc_feature (279)..(332): n=unknown
gtcgtgctgaagcncttggggaccgtttccncggcatttccccaactccttctccacccccctgccaggcccggaagtaccaccagcttcctaagggatgcaggaaggggccgggtgaactgangngaagtccagggcangggagtcanacccctcaacatcctgtttaggggtcctcctccacaaagggtgccctccacctctccctcctgctggttggccggctcagagatgaagggggagagatggtggctccaaggctctgccaccgccacctcncaagcctgccaacgtgaatggctngcagaatcagtcagcaggccagcggcttnggaaagagcaactgtctcgcagcctgggccagctgggggaacaatgtag

SEQ ID NO: 1468 - DNA, 468 bp, homo sapiens
tttaagtaattgcattcagttccaggataggtgatgagaaggtgactcccaagtggagcagggagacccattggatttcaggctcccctcagccctgtaacctggcatcaggatctgagggctggtctgaagtctgcccttgggtgagcgtgtcagtgccccctcagaccatcccagctcaagtccactgcccaccatgtgccaacccccccgcaagcctgggacccctaagcaacaaaccctacattgttcccccagctggcccaggctgcgaggacagtggctctttcccaaggccgctggcctgctgactgattctgcaagccattcacgttggcaggcttgggaggtggcggtggcagagccttggagccaccatctctcccccttcatctctgagccggccaaccagcaggagggagaggtggagggcaccctttgtggaggaggacccctaaacaggatgtt

SEQ ID NO: 1469 - DNA, 443 bp, homo sapiens
  misc_feature (27)..(79): n=unknown
  misc_feature (309)..(309): n=unknown
  misc_feature (410)..(436): n=unknown
gttgagaagtgtgccttttttttaatngcttgaantttcagaggtgataannattaaaatcacactactatttgaagcncattttctatgcaggtttttaaacgtcatttatgtatcattctttttatatatcacacttaagcttgtgttagcttttttcttttgccccagatcaaactgaacaatgtatataacactatctgtctgtaaaatactttttttaagaaagcatttatatttatatgacagcttgaactgacaacattgtgtatatagatcatcttgaagtattatttcacattgaaaagnagaaaatatattgataactatagatgttatgaagaagagggtatttctagtttgtactaaaaatcaattggatgaactaaatcccaaacatgacactgtangcagcagttttaagnctaattttacngggtata

SEQ ID NO: 1470 - DNA, 338 bp, homo sapiens
  misc_feature (235)..(299): n=unknown
acggcaaaatcttagcagcaaagtggttaaacaaattgaaaatattaatgcacaaacattaaaatattaaagcatatatgttgcatataaaatacagtacagaaccaggagttgcactatactgattagtgcttaacagaagaaatgattaaatttgttcctcccagaagtatatacacagttcatttccacagcattttcctatatagccagcaagttattttcttcagttatnacaccttgatcaaaccngaattataaacttagcacttacaaatatgaaaattcattcacaaggnaaaacagtatttccatttcaccaataaaaattttgaaag

SEQ ID NO: 1471 - DNA, 340 bp, homo sapiens
  misc_feature (129)..(292): n=unknown
gacaatgcccagacctctggcatagaggagccttctgagacaaagggttctatgcaaaaaagcaaattcaaatataagttggttcctgaagaagaaaccactgcctcagaaaatacagagataacctcnnaaaggcagaaagagggcatcaaattaacaatcaggatatcaagttggaaaaagaagcccgattctccccccaaagttctagaaccaganaacaagcaagagaagacagaaaaggaagaggaganaacanatgtgggtcgtactttaagaaagatctccaagnatatctagacccactgcaaaagtggctgagatcagagatcagaaagct

SEQ ID NO: 1472 - DNA, 442 bp, homo sapiens
  misc_feature (4)..(109): n=unknown
  misc_feature (226)..(441): n=unknown
cttnnnngaggaatgatgttttcaatactgataccaacatacaccaagcgttcttttcttcgttcggcacgctctttcttctttaaggcaacatccaaatcctgnaacngttcctctaatttttcacagagcagtttatgttggcaaggtgggcagaaccattctccatctgggatgatcatcagaggagggcgaaggcaggcagtatggtatccactatcgcaanagtcacacagnagcattagcncaggntngtttggaaggccacattttttgcatggttcatcatcatctgcnaggatggcttcntcactttcctnttcttcctcctcttctgaagctgcagatgatntttcactgccagacccntcactttcatcattgctggaatatntccatctgccacgtgtccgagnancagtccatcgaactttgccttnng

SEQ ID NO: 1473 - DNA, 235 bp, homo sapiens
  misc_feature (87)..(158): n=unknown
cccgcccacatctccttggccccgccccactcccgcggggctattgtccccgacccaagcactctggggactcactccatagtccangagttccaggttccggattatgttccatggcagcagtccaagcaggaaaccaagccatctactctgcctcnagtccaacaagccaacagccttcatacaagcaaaatgaagactttgactagggtccaaccagtgtttcacttcaagc

SEQ ID NO: 1474 - DNA, 475 bp, homo sapiens
  misc_feature (86)..(215): n=unknown
  misc_feature (403)..(407): n=unknown
gagactgagcagacgcctccaggatctgtcggcagctgctgttctgagggagagcagagaccatgtctgacatagaagaggtggtnnnnnnnnnnnnnnnnnnnnnnnnnnnnnnnncagctgttgaagagcaggaggaggcagcggaagaggatgctgaagcagaggctgagaccgaggagaccaggnnnnnnnnnnnnnnnnnnnnnnnnnnnaaggaggctgaagatggcccaatggaggagtccaaaccaaagcccaggtcgttcatgcccaacttggtgcctcccaagatccccgatggagagagagtggactttgatgacatccaccggaagcgcatggagaaggacctgaatgagttgcaggcgctgattgaggctcactttgagaacaggaaganagangaggaggactcgtttctctcaaagacaggatcgagagacgtcgggcagagcgggccgagcagcagcgc

SEQ ID NO: 1475 - DNA, 511 bp, homo sapiens
  misc_feature (395)..(497): n=unknown
gcaggcaggagtggtggctcccacctaggccagctccccatttccaaacaggagctgcctggggtgcccaggagggcccgggaactgggggagtgcaggccggaggaggtgcgagcgaggagcagatctttggtgaaggaggccaggctctatttccagcgcccggtgactttagccttcccgcgggtcttggagactttctggttatcgttgatcctgtttcggagaacattgatctcatatttctgctgcttgaacttctcctgcaggtcgaacttctctgcctccaagttatagatgctctgccacagctccttggccttctccctcagctgatcttcattcaggtggtcaatggccagcaccttcctcctctcagccagaatcttcttctncttttcccgctcagtctgcntctttcccanntttccgctctgtctgggctgcttctggatgtaacccccaaaatgcatcatgttggacaaagcttcttcttnccgggcctcatcct

SEQ ID NO: 1476 - DNA, 360 bp, homo sapiens
  misc_feature (182)..(185): n=unknown
agagagtagaaaacaacttagtttttcttttttcctgaatgcgtcataggcttgtgagtgatttttgtccattcaattgtgccttctttgtattatgataagatgggggtacttaaggagatcacaagttgtgtgaggattgcattaacaaacctatgagccttcaatggggaagaccaganngntgagaggggccctgaaagttcatatggtgggtatgtcccgcagcagagtgaggagatgaagcttacgtgtcctgacgttttgttgcttatactgtgatatctcatcctagctaagctctataatgcccgagaccccaaacagtacttttactttgtttgtacaaaaacaaagaca

SEQ ID NO: 1477 - DNA, 211 bp, homo sapiens
  misc_feature (66)..(191): n=unknown
agggggtttatttgtattttttaaatgttctgcttggagataattacagataagcacacaattttnagaanttatgcagagatccctgatacccnnnnnnnnnnnnnnnnnnnnnnnnnnnnnnnnnnnnnnnnnnnnnnnnnnnnnnnnnnnnnnnncagtgatacaatccatagtccttacacaggtgncgtcagttttacatgcactc

SEQ ID NO: 1478 - DNA, 73 bp, homo sapiens
aggtgggtgtagctgtaaaaggttagtgcaaaggaaccttgtgatgaaactattctgtatcttaactgtggtg

SEQ ID NO: 1479 - DNA, 392 bp, homo sapiens
  misc_feature (365)..(365): n=unknown
gtccacttaatggcacttctactagggagcaaggaccatcccggcacgtttacctgacatatgaaaatctgttgtctgagcctgttggtggtagaaaggtggttgaaatgtttcttaatgactggaatagcattgcacgattatatgagtgtgtgttggaatttgcacgttctctaccagacatacctgctcatctaaatattttctcagaagttcgtgtttataattaccgaaaacttatcttgtgttatggaaccaccaagggaagctcaattagtatccaatggaattcgatccatcaaaaattccacatttctttgggaactgttggcccaaactcaggttgcagtaactgtcacaaatancattctcccatcagcttccaagaaatg

SEQ ID NO: 1480 - DNA, 337 bp, homo sapiens
  misc_feature (146)..(169): n=unknown
  misc_feature (285)..(285): n=unknown
tgtttataacaactcccagaacatttcatgtaaggattcaaagcggtcatattaaaatacagcttcaatataaagtttatcacagttttacagtattcaaaaatgacagacctgccttaaaaaacaaaacaaaaaccaaaaaaggnctattacacccaaaacataaganaacaattaaataaacaagtttggcattttcataactttatagtataaaacagaatattaaatttattactggcaaacggacactgatttatttcctttgaaatgtgtcccatttanacacactatacaagttcattatacaaaagatggatgatcattttgatgaaag

SEQ ID NO: 1481 - DNA, 439 bp, homo sapiens
  misc_feature (304)..(306): n=unknown
caggagcagacctactggctggtgaacaggcccccgcccggggcccccgatgtgctggagcagggtccagggcggggatcctgcgctgccagccgtgtgctcatgaccaagagtgcagatttccataagcgggagatcgagtacttcaggaaagcgctgggcaggacccgagtgaagtcctccgtctgccttgaggcgtacctgagtttctgcggacagcgtggaccccacgatcccctcgtgtcggggtgcctgcccagcaatccctggatctcagacaatgacgcctactgggtcatgaatncncccacccctgccctctccccagggtggctgcccccacgaagctccgtgtggagagatggggcttcagcttccgggagctcctgggaggaccccgtggggcgggcccactttcatggactttctgggaaaggag

SEQ ID NO: 1482 - DNA, 406 bp, homo sapiens
  misc_feature (187)..(187): n=unknown
  misc_feature (297)..(400): n=unknown
ttgggagtgactggatgtgagccagccctatgggtggggatggcaccgccctaccgccgagagagttgaagctgcacccccgaaaggagccagctgtaccttcacccagtctgggggactggtgaggcacttgggggatggggagcaaggccagctcacgaaggaagacttgggcagggaggatcanggacgcctggcaaggatccaccctatggaatcgggcctcgtcagtggggtgacaatgtcagagttgtctataaatcgggggggaggccgcgggcctcgaggtgggaaaancaggtgccggcgcacctgtggacaaaattctggaacgcgtttgggcgaggngagggataggcgcaactcccggaaggcaattgaccctcgaggcagncttcangcaacg

SEQ ID NO: 1483 - DNA, 483 bp, homo sapiens
gaccgacacctccaccctacaagtactgaaaaggcacagcttactgaaacaaatgcaggtatcaagtgcttggactccatgtgctgtttcccggaaggagaagcagcgtgtgcatctgttggaagaatgctggaacgagttataggaagatgtagtccaacccacatcagcaggtgtgaaatctctctaagtagcctttgctgcagatgagtatcctatctggaacaggatgaacctgccgctctagatacctaataaatcagcagctggttttaccaactgaagcaggaagtctgctatttattagcactctttggtggtagatttcactttgtggctttggggtaagggctttttcactcacaaaggaagagaaagcacctttgaagagacttcatctaatgaacaaaaaattttgtttcataatctttctaaaatgtgctcagtaggagtgtgtttatggtactcttttatggtttgtat

SEQ ID NO: 1484 - DNA, 528 bp, homo sapiens
  misc_feature (507)..(507): n=unknown
gagcagaaatacagccttttgtgtttataaatacctcaaagcctcaaataaccaactggaaaatatacatacagagtaagaaaaggaaagcctttgacttcactgttatgttgagattattttgtaaagacaaaaagcaaaaaaattttaaaaaaataaaaaggaaatagtatatgtataatttaaaaaagaaagttatacaaaccataaaagagtaccataaacacactcctactgagcacattttagaaagattatgaaacaaaattttttgttcattagatgaagtctcttcaaaggtgctttctcttcctttgtgagtgaaaaagcccttaccccaaagccacaaagtgaaatctaccaccaaagagtgctaataaatagcagacttcctgcttcagttggtaaaaccagctgctgatttattaggtatctagagcggcaggttcatcctgttccagatagggtactcatctgcagcaaaggctacttagagagatttcacanctgctgatgtgggttgggact

SEQ ID NO: 1485 - DNA, 377 bp, homo sapiens
  misc_feature (322)..(365): n=unknown
gcacgagaactctcaaagcgggaggaagaaaaactggacaggctgattgctattggtgaggaggccagtgctcagcaagatactgccaatgagctccgcaggatgctgtcatcgcagtcagacgtttggcaacagcagtggaagaggcaactggtgcttttcagctaggccttgaaaaattgcttcagaggttgatttcgaataccaaaagctaggaaccaattacaaaaggctctgcttcctaaactggtagaagtctagttcccaaacctgcttctgaatccctggctccttttctgtgtcctccagaaaaaaacatggntgaaccatttatatccagatagtatgaaaataattgctagntccattttcccaga

SEQ ID NO: 1486 - DNA, 466 bp, homo sapiens
  misc_feature (420)..(420): n=unknown
ccagtattttatattgaagattatcgatataaaccgtaacacacaatggcggctccctggcacttcttatttccttatattgataggagactaagaaccagtaaaatgaaggagagaaagacggtttgacaaaacagtgcttactagtagatatgtcagatacacagcagtggaaatgtaagagattaaggtacaaatacaggttgtgcttatagtcgtctaatgagccacacagggattttaaaaattaagatttcaaactccatgaagcagtcaagttagaccagcaaaggaagattcaagcaatgaagtcacagtatatatccatacttctgtatcttgtaaaccaatctgccttacctcagccaaggccatatgaattaataacttaaatgtgtacagtgctttaaacttttaaancctttcacatctatggactacgtgattctcacaacaaccctgtgag

SEQ ID NO: 1487 - DNA, 282 bp, homo sapiens
ggcaaaaaaaaaaaagtcctgtggaaatcatatagacaaacatttgcaaagctgctactgccattgtaccagtgttaaactgtgttctaccttgcatcttttactgatttttatgacagattttatattgtaaccattcgagaactctgtaagtgctatggcttccttaaactacgatttatcatatgctcccggtgtttactttgagactgaatggcaaccagagaatgtaaacaaccaaggtgcatctggttatgttttaaaataaagattaataaaagt

SEQ ID NO: 1488 - DNA, 250 bp, homo sapiens
gcaccttggttgtttacattctctggttgccattcagtctcaaagtaaacaccgggagcatatgataaatcgtagtttaaggaagccatagcacttacagagttctcgaatggttacaatataaaatctgtcataaaaatcagtaaaagatgcaaggtagaacacagtttaacactggtacaatggcagtagcagctttgcaaatgtttgtctatatgatttccacaggacttttttttttttgccctcg

SEQ ID NO: 1489 - DNA, 366 bp, homo sapiens
  misc_feature (202)..(202): n=unknown
acgggaattgcctggcgccacccccacgacccctccttcctgctgtctggctccaaggacagctcgctgtgccagcacctgttccgcgacgccagccagcccgtcgagcgcgccaaccctgagggcctctgctacggcctcttcggggacctggccttcgccgccaaggagagcctcgtggctgccgagtcggggcgcaagncttacactggcgaccggcgccaccccatcttctttaagcgcaagtgggaccctgccgagcccttcgcaggcctcgccttccagtgcccttcagtgtctttgagacggagccaggtggcgggcggcatgcgctggtttgtggaacacagctgagcgttatgcgct

SEQ ID NO: 1490 - DNA, 434 bp, homo sapiens
  misc_feature (45)..(45): n=unknown
gaatatttgaggtattgcatttcttattttatgacctagtgtttnctcattttgttcttaattgtgattggcctatcagtaatactattgacagatacaattcaatagctactctgtgtctattgtgagcaagtcattgtgattaggtactgcctaaagtataaaaaagggaatgaaagaaaacaaaaagtgattacaaaaagtagaacatgataagtgaattcaagaaatggtttcatagatgaggtaacacttaaaatgcttttgagtgatcacagaatatattcatgtttctggtagaggaaatggcataaggaaatgtgtgcaaaaagtgtaagatatgcttgacaagtatgtagctggagtagagtgtagcagagtaggaggcattatagggtggtgattaagaactttggctttgggagccagacagc

SEQ ID NO: 1491 - DNA, 531 bp, homo sapiens
tccacttcatctcctcccaaatgaatgaattgatctggaaacacctcactaatttctttgaaaaatgtagtaaggaagctgtatgttgtattcagagtagggtttataggtccaaaagagtccaacttgttttgtctactgtaacatggagtcaggaggtctttctgacctagaagaaaatattaagattctttttaaaagaagtgtactcattataaagatctggttttccacatgattttactacgtcattttattgaagctacaagattttatacacaaaagatgaacatgtttactaagagctagtaatttcttccagataagaagggtttcctgaatcctgtctctttgcctctttgtttcccattatatctgagattttatctatgtcaaatgttagtaactcccaaatcttcagtttgcctcaacgctttttcttgagcttcaattcatatttcaaattccctgctggatacaactgaatatcctagctgtacttcaaatacaagctaacaaaaaacaacatct

SEQ ID NO: 1492 - DNA, 440 bp, homo sapiens
  misc_feature (39)..(39): n=unknown
  misc_feature (188)..(188): n=unknown
  misc_feature (313)..(496): n=unknown
gtgctgggtcttcgccgccgtggcctgcacagtgctgangtgcctaggcatccctacccgcgtcgtgaccaatacaaatcggcccatgaccagaacagcaaccttctcatcgagtattccgcaatgagtttggggagatccagggtgacaagagcgagatgatctggaacttccactgctgggtggantcgtggatgaccaggccggacctgcagccggggtacgagggctggcaagccctggacccaacgccccaggagaagagcgaagggacgtactgctgtggcccattccagttcgtgccatcaagganggcgactgagcaccaagtacgatgcgccctttgtctttgcggangtcatgccgacgtggtagatggattccagcagacgatnggtctgtgcacaaatccattcancgttcccttgattcgttnggct

SEQ ID NO: 1493 - DNA, 433 bp, homo sapiens
  misc_feature (320)..(395): n=unknown
ggaaagtttgggtatgtgcataacagagacagaaattcagtgtttgacagatcaagtgtgaggtgcccactgagcatcaaagtggatatgttaagcaggtattggatgtacaaatctaaattcagtaaggtcagtccaggagaaaatttggggagtagttagccatgggatcagatgggcgctttagggacactttggagatgaagtacagcactgagccctgagttcctgtgacagagaagcagcctgcaaagacgaaaggaggagctgttaggaagagcaaggcaacagaaaaggaagaaccagcatgctgattatgntcaggagagtgtttctacgctgaatttaattgccaagattaccaattctaaagaagaggaggactcttggacaantttttagaagttgggtttggagctggggtgagagcctg

SEQ ID NO: 1494 - DNA, 409 bp, homo sapiens
  misc_feature (294)..(386): n=unknown
agggaagtgacattatctgattttcgttttataaagatccctgcggctgccgtcagtgattgtaggagggcaggagtggatgcaaggacagcagacattagtgcaggagttcaggtgaaagatgataatagcttggacagagtggtagcagtggacatggagggaggtagacagatttaagatgtctcggagacagctgatggaatttgctgataactggaatgggagtgacaatgacaaataaaggaacctagaataagccccagaattttgcttaagcaactgagagttcanccatggcagatctgttaagcacnaaagttaaacacaaatacnaattcatactgcattggactcttttaagcagtgtcntatagaaaaaacantttatctagggaaaaatgcaaca

SEQ ID NO: 1495 - DNA, 457 bp, homo sapiens
  misc_feature (342)..(342): n=unknown
gccactgccgtctccgccgccactgggcccccagagccccagccccagagcctaggaacctggggcccgctcctcccccctccaggccatgaggattctgcagttaatcctgcttgctctggcaacagggcttgtagggggagagaccaggatcatcaaggggttcgagtgcaagcctcactcccagccctggcaggcagccctgttcgagaagacgcggctactctgtggggcgacgctcatcgcccccagatggctcctgacagcagcccactgcctcaagccgtggccgctacatagttcacctggggcagcacaacctccagaaggaggagggctgtnagcagacccggacagccactgagtccttcccccaccccggcttcaacatcagcctccccaacaaagaccaccgcaatgacatcatgctggtgaaagatgggatcggcagtctcca

SEQ ID NO: 1496 - DNA, 417 bp, homo sapiens
gatgagccctgatgagggtcaagaggaactggaagaagttcaagctgaattaaagaagaaagatgaagaatttcaacgaaccaaacttttaaatggaccgggagatgttgaaacgggtacaagcataacagtacctcagaaaaagtggttgcattttatttcacccatttttgttcaagctcttacattaacattcttagcagaatggggtgatcgctctcaactaactacaattgtattggcagctagagaggacccctatggtgtagccgtgggtggaactgtggggcactgcctgtgcacgggattggcagtaattggaggaagaatgatagcacagaaaatctctgtcagaactgtgacaatcataggaggcatcgtttttttggcgtttgcattttctgcactatttataag

SEQ ID NO: 1497 - DNA, 541 bp, homo sapiens
  misc_feature (461)..(535): n=unknown
ttacattgtttattcaatatagaaaaaatatgaatacattcatagtattctcttttaatttggtaattccacattgtcaaatattgactgtttttatattgggtgtcctacccaattaaaaaaaaaagaggaagaatgacctggcagacagttcttgttgtgccatgttattgatataacagcaatatcatatatgtctctttttttaaacacctagttttgaaaagaccaatgattaaactactgtttactggctcagggaaatgttttaagaaatagaaattaattcattctttccccaagaaaaactttaaggtaaacatcttaaaacacctaagtgatgaaggagaaaatttgtattccttaaaaaggggtcagtgctgaaagaaaattgcatggtagaccccactgcacaacggttctgcaccaaaagaaaaatgaggaccatattaacataattntgttggagagaagaaaaacccacacttagaagtcaggttctttaaaactccttgttaccaaatagaatcnatgnttatat

SEQ ID NO: 1498 - DNA, 381 bp, homo sapiens
agacaacagacagcagcattcattcataggatcaactaacaaccatgtggtgaggaattcaagagctgaaggacaaacactggttcagcacaggcgtgtctccttcaagggggtctctgagaacttctctgggtagtggatttggctctccgtcagtgaccgacccccgacctctgaaccccagtgcatattcctccaccacattacctgctgcacgggcagcctctccgtactcacagagacccgcctccccaacagctatacggcggattgggtcagtcacctcccggcagacctccaatcccaacggaccaacccctcaataccaaaccaccgccagagtggggtcccactgaacctgacggatgcacagactcgagt

SEQ ID NO: 1499 - DNA, 344 bp, homo sapiens
  misc_feature (200)..(322): n=unknown
actcttttcctagtaagtcatccaattcgttcagtcccagtaaccgggcctggggcacctccagctccagccgataggacaggttcctcagggtgcacacgcagttctccaccgtcttgctgtcgtaatcggatgtgttcacacacgtgtggatcacatacaacagtgagtctaccagcccctcgcaggaccgcatttgnttccgagcttcttcccccgcggagcngangttccttaggcaacctgtcgtgttacgcngaactagtgaagtctgaaatttaattttatgatcatcatcnaaagaagagttattccntccagnatgtggaacaatccacagtggt

SEQ ID NO: 1500 - DNA, 440 bp, homo sapiens
cactgttggtcccagtagggatggcacaatcagcgaggacaccatccgagcctctctcatctctgcggtcagtgacaaactgagatggcggatgaaggaggaaatggatcgtgcccaggcagagctcaatgccttgaaacgaacagaagaagacctgaaaaagggtcaccagaaactggaagagatggttacccgtttagatcaagaagtagccgaggttgataaaaacatagaacttttgaaaaagaaggatgaagaactcagttctgctctggaaaaaatggaaaatcagtctgaaaacaatgatatcgatgaagttatcattcccacagctcccttatacaaacagatcctgaatctgtatgcagaagaaaacgctattgaagacactatcttttacttgggagaagcttgagaagggggcgtgatagacctggatg

SEQ ID NO: 1501 - DNA, 422 bp, homo sapiens
  misc_feature (11)..(15): n=unknown
  misc_feature (396)..(409): n=unknown
cacaaaaagtntacngaggatagaaagtgcattaataaaagccagtctttaccaaaagaaaacagaaaatatattattgattcaaaatattttacacttgaatgataaactgcaataacttattctgggcacctactgataaaaggaagagaagaatactttaagaagagctcaacctccagctggtatcagagaagtcagtagcgctcactgagaccggcagtctttcttgctttttgcattagtgccctcagctggaactgtttacgggacagaagacgtacatgcttcaggaagacatccaggtctatcacgccccttctcaaggcttctcccaagtaaaagatagtgtcttcaacagcgttttcttctgcatacagattcaggatctgtttngcannngggagcngtgggaatgataa

SEQ ID NO: 1502 - DNA, 347 bp, homo sapiens
  misc_feature (178)..(178): n=unknown
  misc_feature (290)..(392): n=unknown
atttgtttctccccaaatctagaaattttagttcatatgtacactagccagtggttgtggacaaccatttacttggtgtaaagaacttaatttcagtataaactgactctgggcagcattggtgatgctgtatcctgagttgtagcctctgtaattgtgaatattaactgagatagtnaaacatggtgtccggttttctattgcattttttcaagtggaaaagttaactaaatggttgacacacaaaaattggtggagaaattgtgcatatgccaattttttgttaaaancttttgttttgnactatactgctttgagatctcattcagaagaacggcatgaacagt

SEQ ID NO: 1503 - DNA, 591 bp, homo sapiens
  misc_feature (583)..(583): n=unknown
ccatttcaaaataaaaacaaaatcccagatcatatagatgtttacagtgattacatttatctaagcaacatacatacatgttcagttgtaagatgttaactaaatttctgtgacaaatatgctttttttttaataccaagaacattatagagttaatgcagagtcctaaggataatctagtagtcactaagtttttcttaagtcttcactttagatgctgttatttctagcacaattaagcaggcagagtctttcatatgctcaaacactggaatctttggttgctaccatatcagctggcttgcagacaagaagccaaccattttaagaatgttttaagtgaacaacttgcaaaccccagggatggaaaaaccctaagaatgcacaattgtgagcatttaacaaccatcacaactgtggctgaagactgttcatgccgttcttctgaaatgagatctcaaagcagtatagttcaaaacaaaaggtttaacaaaaaattggcatatgcacaatttctccaccatttttgtgtgtcaaccatttagttaacttttccacttgaaaaaatgcataggaaaccggncaccatgt

SEQ ID NO: 1504 - DNA, 360 bp, homo sapiens
ctcatttaaaaatttatgccacagtccttataattggaaaaatactggtgcccaggttttcttggagttatccaagcagctgcgcccctagctgggatctggtacctggactaggctaattacagcttctccccaacaggaaactgtgggatttgaaaaggaaagggaagggaaaacagagaacctagtggtctaccaagtggttggcaactttcccaatgtctgcttactctgaggcttggcactgggggccagggcctgccccagggctcctggaatttcccttgatccagctaggctgggacactccctaaatcagctgcgtgttgttagcatcaggcagaatgaatggcagagagt

SEQ ID NO: 1505 - DNA, 425 bp, homo sapiens
  misc_feature (318)..(336): n=unknown
gatttgactgagatgccttatggagaagtaccccaccctctatgaagacagaatcactctctgccattcattctgcctgatgctaacaacacgcagctgatttagggagtgtcccagcctagctggatcaagggaaattccaggagccctggggcaggccctggcccccagtgccaagcctcagagtaagcagacattgggaaagttgccaaccacttggtagaccactaggttctctgttttcccttccctttccttttcaaatcccacagtttcctgttggggagaagctgtaattagcctagtccaggtaccagntcccagctaggggcgcantgcttggataactccaagaaaacctgggcaccagtatttttccaattataaggactgtggcataaatttttaaatgagcggacgcgtgg

SEQ ID NO: 1506 - DNA, 453 bp, homo sapiens
gaccttcctactgcccccctctacaaggacgagaaggagcagctcatcattccccaagtgccactcttcaacatcctggctaagttcaatggcatcactgagaaggaatataagacttacaaggagaactttctgaagcgcttccagcttaccaagttgcctccatatctaatcttttgtatcaagagattcactaagaacaacttctttgttgagaagaatccaactattgtcaatttccctattacaaatgtggatctgagagaatacttgtctgaagaagtacaagcagtacacaagaataccacctatgacctcattgccaacatcgtgcatgacggcaagccctccgagggtcctaccggatccacgtgcttcatcatgggacaggcaaatggtatgaattacaagacctccaggtgactgacatccttccccagatgatcacactgt

SEQ ID NO: 1507 - DNA, 443 bp, homo sapiens
  misc_feature (225)..(260): n=unknown
  misc_feature (405)..(428): n=unknown
ggaaatggggggaaccataggaaaatcctccacctctaacagagcgaagttactggctttctgcttgctccaagaatcccaaggcttgatgtttggaaggaattatctgttcttcaactactcccagatactcaagacataagttacacacatctggagaagggttctgccctgctgaagctagatgggagctcaatgcatgggagaaaggagcatcaatctagnaaaaaatgatcaaagacacanctgagtgnnaccgngggtgcctcccaggcaagtgggctcttggtgctctggtgtagccagaacccatacaagctgggctggcctaggaagcccaccagccagcctgtgttcagctacagcttctgtgttcttatttaccatcatcagccacagcccttnggagcaaagccctagacgcctcnttcaagccccctgct

SEQ ID NO: 1508 - DNA, 405 bp, homo sapiens
gtcagaagggacaaactgtccacccaaggaacagcctggcgatctttttaatgaggactgggactcggagttgaaagcagatcaagggaatccatatgatgctgacgacatccaggagagcatttctcaagagcttaaaccttgggtgtgctgtgccccacaaggagacatgatctatgaccccagctggcaccatccgcctccactgataccctattattccaagatggtctttgaaacaggacagtttgacgatgctgaagattgagtgtggagctttctgccttgtaggtgggcgggcctccacgtcaagatctcttttcctgtcttggaggtgaaaagtcatatctgagaaaatgtttgcagtgacccctagtctggggtacacagaccagtgttccttat

SEQ ID NO: 1509 - DNA, 426 bp, homo sapiens
  misc_feature (406)..(409): n=unknown
gtgcaggggcgtagtgggatatggccaactcgggctgcaaggacgtcacgggtccagatgaggagagttttctgtactttgcctacggcagcaacctgctgacagagaggatccacctccgaaacccctcggcggcgttcttctgtgtggcccgcctgcaggattttaagcttgactttggcaattcccaaggcaaaacaagtcaaacttggcatggagggatagccaccatttttcagagtcctggcgatgaagtgtggggagtagtatggaaaatgaacaaaagcaatttaaattctctggatgagcaagaaggggttaaaagtggaatgtatgttgtaatagaagttaaagttgcaactcaagaaggaaagaaataacctgtcgagttatctgatgacaattncgnaagtgctcccccattcc

SEQ ID NO: 1510 - DNA, 484 bp, homo sapiens
  misc_feature (294)..(424): n=unknown
catctttccaattttcaaaatgttattatcaattgtctgcagattactctcattaagctgatttttaaaaatctcagacagagcagagcaattcaccagcaccatcatcaagtgagctacaaatctatcttttaccagagcaaggagacacttaagatcaattcaagagaatagctttcagtgttcacagaaggggtactcacattcatttgtcacatatttcaggccctcatacaccccttttaaattgtctaactcctatcccagtttctttttatagtctaaaaacaaggnatcacccaagtaagatactccttcagagcactgctgaaaatggntcaaacgtggagatcccccagatccctgttctcaagtgttaaaaatattttatattagcacatagaatacccttagnntatattcnggtatgttctaaagaggttgtgtttccccctttttgatgatgtcttcaatttcttctgag

SEQ ID NO: 1511 - DNA, 258 bp, homo sapiens
  misc_feature (78)..(82): n=unknown
gatcctcttccgttcagccagatgtttcctgtataaatgtttggatctgcctgtttattttggtgggtggtctttccnccnncccctaccacccatgccccccttctcagtctgcccctggcctccagcccctaggggactagctgggttggggttcctcgggccttttctctcctccctcttttctttctgttgattgtcgctccagctggctgtattgctttttaatattgcaccgaagttttttaaataaaattt

SEQ ID NO: 1512 - DNA, 223 bp, homo sapiens
  misc_feature (45)..(45): n=unknown
  misc_feature (196)..(196): n=unknown
aagcaatacagccagctggagcgacaatcaacagaaagaaaaganggaggagagaaaaggcccgaggaaccccaacccagctagtcccctaggggctggaggccaggggcagactgagaaggggggcatgggtggtaggggagggaggaaagaccacccaccaaaataaacaggcagatccaaacatttatacagngaaacatctggctgaacggaagaggat

SEQ ID NO: 1513 - DNA, 495 bp, homo sapiens
  misc_feature (462)..(462): n=unknown
caatttgtttggtaaaacaggaacgtataatgtttccaccccagaagcaaccagctcatccctggaaaactcatccagtgcttcttcgttgctcaactaagaacaggataatccaacctacgtgacctcccggggacagtggctgtgcttttaaaaagagatgcttgcaaagcaatggggaacgtgttctcggggcaggtttccgggagcagatgccaaaaagactttttcatagagaagaggctttcttttgtaaagacagaataaaaataattgttatgtttctgtttgttccctccccctcccccttgtgtgataccacatgtgtatagtatttaagtgaaactcaagccctcaaggcccaacttctctgtctatattgtaatatagaatttcgaagagacattttcactttttacacattggggcacaaagataagctttgattaaagtagtaagtanaaggctacctaggaaatacttcagtgaattcta

SEQ ID NO: 1514 - DNA, 343 bp, homo sapiens
  misc_feature (101)..(151): n=unknown
  misc_feature (254)..(268): n=unknown
tagcaagatgtcatctacacatttgtacaaaggttcagacgtcctatgctatgcacgatcctcagaaagtatgagcctgtcgtgcggggacgtcgcaaacnctggcaggctcacccctcgtctgcatttggcaagaagcgcctcccaaggnccccccaccctgcccagggtgccccccagagggagcaggcctcccacagctggagagagcccggcccccagaacaccttccctagaaaaccataaaaacatanatcatttgtcttcnaattcccacggcaaattccgcatttatgggcaaaatgatataaaaatatgaacctaacagaacctttacaaaacc

SEQ ID NO: 1515 - DNA, 484 bp, homo sapiens
tacgttgcagaattaggaacagtatttatatttatttacacaagacattgtgccatagcatcctagtaaaacaccttcatgaatgagtaatgttatctcccagaattacattaaaattatttctaaaaagtagcaaagtcattaccttttgcttttaatgacccacacctcaccagctcctggtcttttcttcactgttgcccttattttgaggcaatttttcttaaaatatgacttttatgcaccacatttagtagaggcagtgacatcagtgatctcagtacccatcagctgtccccctcctctgcccttcttcatctcttctaaccttgtgaccatttcccttaccggttcatgttctcctttatctctgcttttctttcttagccaggatacttccctcacaactctcactcccaaattcttttagatatacatttttctgggatatgggctgctgaaatctgaagctctgggtaaagtt

SEQ ID NO: 1516 - DNA, 561 bp, homo sapiens
  misc_feature (315)..(315): n=unknown
cagaccttttgtaggcatataaatacatcttaaattcaatcaagatctaaaatgaaaaattattttttctttctaggatcaatcaacacatagccaataggtagttacagctagaataattccaacagttcctgttttaacctgtcagattgtctccaaaaggccatcttcaaagtgcgatctaagagaggaaagctgaatattttcctttctgcatcggcactccacctttctttacttatgctcagctatcagagatggctgtcaccttcaaagcctaagtgagatccaatttttgaattcaacatgaaacanggacagatatcctgatcctggggtgaccagggtagatgtctgctttgcatcctccctgttacccttctcctgacctccctctagcttctttctgaccctctttcctagccaccaccccctctccctctgacacagttcacaaaatattcaaagggagcacctaacaaacaagagggaatttgcacaactggttacttaaaaccatacaaaccaaaatgttttggtacttcattatataggataaac

SEQ ID NO: 1517 - DNA, 477 bp, homo sapiens
  misc_feature (288)..(288): n=unknown
  misc_feature (406)..(470): n=unknown
tgctggggaagggttttcttttctttttttctttaataacaaggagatttcttagttcatatatcaagaagtcttgaagttgggtgtttccagaattggtaaaaacagcagctcatagaattttgagtattccatgagctgctcattacagttctttcctctttctgctctgccatcttcaggatattggttcttcccctcatagtaataagatggctgtggcatttccaaacatccaaaaaaagggaaggatttaaggaggtgaagtcgggtcaaaaataaaatatntatacatatatacattgcttagaacgttaaactattagagtatttcccttccaaagagggatgtttggaaaaaactctgaaggagaggaggaattagttgggatgccaatttcctctncactgctggacatgagatggagaggctgagggacaggatctatagggcagcttctaagagcgancttcaca

SEQ ID NO: 1518 - DNA, 501 bp, homo sapiens
  misc_feature (397)..(490): n=unknown
atattatcaagcaggcatctgatgacctgtggaattagaaataccagcagacatttccaaggggtaggtgcacaggtcaacagaactaaactacagtgatcttcccttagatccttttctactgaggtgaatagctcaaaagacaaggatgcctttagtccaggctaacccctgtagcctctacgcaattaacacagaagaaaggccttcctcccttccagcactggggctcaacagtggactgagtgtttggtagtgtacatttccaatcttaatagagcaaagccagacttctgctttgatgactgagctacagggacaggagtggtccaaggttctcaaattctgtttttgtttttttccagacttctatactattgtctgccctaggctgtanggaatgctggttagtttgctgaacagacactgtgttcagcagggtttgtggtatctcaaatcccaggtctcagcccaaagctttgcagttcanccctgactcca

SEQ ID NO: 1519 - DNA, 454 bp, homo sapiens
cgttgtaacacaaccgaaaccaaaaattgaatcacccaaactggaaagaactccaaatggcccaaatattgataaaaaggaagaagatttagaagacaaaaacaattttggtgctgaacctccacatcagaatggtgaatgttaccctaatgagaaaaattctgttaatatggacttggactagataaccttaaattggcctattccttcaattaataaaatatttttgccatagtatgtgactctacataacatactgaaactatttatattttcttttttaaggatatttagaaattttgtgtattatatggaaaaagaaaaaaagcttaagtctgtagtctttatgatcctaaaagggaaaattgccttggtaactttcagattcctgtggaattgtgaattcatactaaggctttctgtggcagtctcaccatttgcatcactgaggatg

SEQ ID NO: 1520 - DNA, 518 bp, homo sapiens
aagtgttcacaatcagttacaacaggatcgacatttcttccattccacactttcacatgacaatatactgtatagtgagagagaaagtttaaagtttttgttctgcatgctgctaacacatttgactagcttttgttttactcattgaatttttaatatcaaagcaaaaagtcattttctcttggacagaaatggttttagaaagcccttatgaagtcagacttagtcttgtttataaacatccacacccacacacatgctgaatggagagcaaaatgcaagaaaactaccttggcaggaacaaatgcttaaagattttaatcacagccctcttgaacaagcagtacagttttttttctccaaaagacaaaagtcagtttcatcctcagtgatgcaaatggtgagactgcacagaaagcttagtatgaattcacaattccacaggaatctgaaagttaccaaggcaattttcccttttaggatcataaagactacagacttaagctttttttcttttt

SEQ ID NO: 1521 - DNA, 267 bp, homo sapiens
ctggcctcctgttcctctgctggacctggggtaggctgcaggggtgggcagaagcccctcttaaattgtggttgccatggtaccgagggactcattcctggggctcgctgggacctccctaaacccttcctggaagaaaactggaaccaactctgccctacctccctgcactaaccagctttgaggatggcactgaagaacccttggagcaaacatacctcccttgtgactcccacatcaaccattaaagttatttaacagcagcct

SEQ ID NO: 1522 - DNA, 249 bp, homo sapiens
cacagaaacactaaataagtcctcccaggggagctcctcgagcacacaatcagcaccttcagaaacggccagcgcctccaaagagaaggagacgtcagctgagaaaagcaaggagagtggctcgacccttgacctttctggctccagagagacgccctcctccattctcttaggctccaaccaaggctctgaccattcccggagtaataaatcccagttggagcagcagtgtgagaagaggggatcgac

SEQ ID NO: 1523 - DNA, 443 bp, homo sapiens
  misc_feature (331)..(431): n=unknown
gtcctctagattcaatgacatccacaaattgtacattatttacaccaaaagcacagggctcgtgtgggtgaacagtctgcagtcaaagccgatgctgggtgtcctgtagtgtagcagcccccgcgccgggggctcaggctcaactgagggttttgtcattttcaagtctgaaagtggctgttctcctgctttgttgtttcttcttttcctggcgtctgggtttttctcccaatggggtgggtggtttgtgtcccgattcactgctagtcccagaaggtgtccagccgagactctttcgggaggaggctcttcgtgctggtactggtgttgngatcggaacgtgtcgatcccctcttctcatcantgctgatcnanctggatttantactccgggaatggtcanagccnnggttggagctaagagaatggangagggcgtctct

SEQ ID NO: 1524 - DNA, 388 bp, homo sapiens
gcatccatctgtggtggccttgtgatgcttttgcctgaaaccaagggtattgccttgccagagacagtggatgatgtagaaaaacttggcagtccacattcctgtaaatgtggcaggaataagaaaaccccagtttcccgctctcacctttgaggcccccgacaaagacagaaagaaggagctatccaggagctgatcctccttgcaaagctgtgtcttgcagagatgcacgtgtgcatttcagctacatcatgccgcgctgttgtaatactgtataaagacctcaatctatccagagtatttttatataatgttggatgagttaggatttgtaatgctgttgaagttctggggacacataatatgtagccagtttaacaaagaagct

SEQ ID NO: 1525 - DNA, 308 bp, homo sapiens
  misc_feature (192)..(292): n=unknown
gttgtcttctccaagctgtagttctacgtcccgacctccctatcataccacactcttcagcgaccacgcaggcactttcccggtccccagtataccataattgaagaaaaatgatggaagagagtggaatagagacaacaccacctgggactcctccaccaaatcctgcaggctggctgctactgctatgtntttctacccctgttccattagcggcaaccagttctttttcttctccaaatgtatcctccatggagtccttcccaccattcgcatactctactcctcagnnggcccttcctcctgtg

SEQ ID NO: 1526 - DNA, 372 bp, homo sapiens
atttgtttctttttgtctcctggaatgacatgatgcctttctagagaaagaaaaattgcaggctacaggaaaatgataaaaactactggattcatttagactattcgatttaggaaggtacaaccacttctttaacatcaagctaaaagtgggggaaagtctcagtctcccaggtaggtctcctctcacactgtcctgggtggcaggcgctgtttatacatgcctgctatcgctctggctgcactgtagatcatctgccgacgggacatcccagtaaatgccatgtgccaatcagtccggctgacattcagtaaactcttttccaggacttcacccactgtcaccaaaaggcctgaccactcagattatagt

SEQ ID NO: 1527 - DNA, 508 bp, homo sapiens
  misc_feature (46)..(46): n=unknown
aatgggcagtgacacttgaggctgaggatgggagtcgacatgagcngggagagggaggtgcgcgctgcttatctgtgattgttgctcacctgagtgtggctgattgtgtacatccagcagctacaatttttaaaaattatatttttacatttattttatatttttctcacccccagtaatttccttccaaataagttcacatgtaataagtagaaattctgtacagtaaaaaagcattaaaaatactattataactgcttcatttgctgggaaccattacaagtagtataaattagctttttccagaaggatcctcttgtagcagggtttatgaatgtaacccccagcaaaatgtgactatatattaggagagccagtttggagcagaggcctgaaggtccctgctatgcagccgtggccacagctcacagcaccagtgctgtggagcatccacacctttgatggcaatgcagagtgatagcaggttccataggtgtgacaaaacagc

SEQ ID NO: 1528 - DNA, 358 bp, homo sapiens
  misc_feature (27)..(293): n=unknown
gtaaacaactggcacaaaattcataannatacaatactcctatgcaatatcactttantctngatatatanttcaattttctcatnaanatcactggccnattntaacactanagnttntntgccaagcatttttanangctcatccntttaaaagaaatacgggcnccaactttgattnctaaaatgtcatagcaatagctanctngatcggcctctttgcncatcctnactttcntcacactanagcagnaatatttttaaatggcnatnaatatncaaaatacngagctntaatgctgttttgtcacacctatggaacctgctatcactctgcattgccatcaaaagggtgtgga

SEQ ID NO: 1529 - DNA, 338 bp, homo sapiens
  misc_feature (331)..(331): n=unknown
cggcgatcccaggcttggcggggcaccgcctggcctctcccgttcctttaggctgccgccgctgcctgccgccatggcagagttgggcctaaatgagcaccatcaaaatgaagttattaattatatgcgttttgctcgttcaaagagaggcttgagactcaaaactgtagattcctgcttccaagacctcaaggagagcaggctggtggaggacaccttcaccatagatgaagtctctgaagtcctcaatggattacaagctgtggttcatagtgaggtggaatctgagctcatcaacactgcctataccaatgtgttacttctgcgacanctgtttg

SEQ ID NO: 1530 - DNA, 478 bp, homo sapiens
  misc_feature (445)..(445): n=unknown
tttggtaataactatctttaacaatgctattatttatttttacccatggggaatgcataagtacaaacattgttagcttatttaacatttattaaaaatacagactctttatactaatgcagaaggataagcctcttcttcccactctaaaaatctcttctttgctgtaaagaattctcagtgcatgtgagctaagactctggagcactcagtagagaggtgtgtgggatgaccagacagaatcactaggttttctctgttttcaactagctgaaaataggaactctagttctaaatattcaaagtctaaatattagaaaaataaggagaggggatatgacaaaatgcttttcaaaatacatgcctgaggtgagactgcttgtatgtttgcatgtggtagcttccagaggaaatcttcagtttaatcttcagggtcatattgtgncagtcttttcctcagatctttgatttgggcatt

SEQ ID NO: 1531 - DNA, 400 bp, homo sapiens
  misc_feature (113)..(136): n=unknown
agcttttcgggcagcatggaaatcattgaggtctcctgagaagaaagacacttgtgacttctatagacaatttttttttcttgttcacaaaaaaattccctgtaaatctgaannnnnnnnnnnnnnnnnnnnnnnnatttttggaaaatggagctatggtgtaaaagcaacaggtggatcaacccagttgttactctcttaacatctgcatttgagagatcagctaatacttctctcaacaaaaatggaagggcagatgctaggatcccccctagacggaggaaaaccattttattcagtgaattacacatcctcttgttcttaaaaaagcaagtgtctttggtgttggaggacaaaatcccctaccattttcacgttgtgctactaagagatctcaaat

SEQ ID NO: 1532 - DNA, 352 bp, homo sapiens
  misc_feature (298)..(338): n=unknown
atacattaacatacatgacacatcaaaatgagaaatgcacagtttaaccgttcaacagctggccttacttcaaaagaacactatattcatattaaacatttacagtctttccatctaactttacacatgtcctaaatcattttccagcacttctcacatagaagtctagttttgctctttaaaatcaccatctgtatcacccctagtagaaacgagggtttccccaattacatgctgaagagagccagccaccaccccacctaaagacatccaagcagtccagagctgcctccgaggncaacccttcggccacggcagtctcgatttcaagaactgantatctgacactagt

SEQ ID NO: 1533 - DNA, 537 bp, homo sapiens
  misc_feature (38)..(38): n=unknown
  misc_feature (492)..(492): n=unknown
caaacatttgagcaagaattgaataaaatactgcgaantggcaaccaagcatacttccagatgggtcaatattctctcgagttgaagaagactatctctggaggataaaacaactaggatcacactctccagtagctcttctgaatacactgttctactttaacactaagtattttggcctgaaaacagtggaacaacacttaagactttcctttggcactgtgtttaggcagtggaaaaaaaatcctttaacgatggaaaacaaagcgtgtcttcgataccaagtgtcttccttgtgtggaacagataatgaagataaaattactactggaaaaagaaaacatgaagatgatgagccagtatttgaacaaattgaaaacacagccaatccttccagatgtcctgtgaaaatgtttgaatgctacttgtctaaaagtccacagaatcttaatcagaggtggatgttttttatttgcaaccagatgctctagntctacagatagccctgtctggtatacgtctactttcactggaccg

SEQ ID NO: 1534 - DNA, 203 bp, homo sapiens
  misc_feature (199)..(199): n=unknown
tgcaagttctaaacttttagtagtgctacccatacacaaccatctggttaagaacccagtaaaagagcccccttccaaggaagctttgcaacagtagagttgtgcaatatggatgtttcttactacaagaaaaaaattatacatggcacattctcattcatattctgtaatgtaaaaagttacaaacatacctaatcanataa

SEQ ID NO: 1535 - DNA, 460 bp, homo sapiens
  misc_feature (365)..(449): n=unknown
caagaagacattagtgagatatggtttgaatatgaaggcacaccactgaaatggcattatccaattggtttgctatttgatcttcttgcatcaagttcagctcttccttggaaccatcacagtacattttaagagttttccagaaaaagaccttctgcactgtccatctaaggatgcaattgaagctcattttatgtcatgtatgaaagaagctgatgctttaaaacataaaagtcaagtaatcaatgaaatgcagaaaaaagatcacaagcaactctggatgggatgcaaaatgacagatttgaccagttttgggccatcaatcggaaactcatggaatatcctgcagaagaaaatggattcgntatatcccctttagaatatatcagacaacgactgaaagacctttcattcagagctgtttcgtcctgtggctgcagatggacagntgcacacacta

SEQ ID NO: 1536 - DNA, 480 bp, homo sapiens
  misc_feature (407)..(407): n=unknown
ctcactgttcattatcaaagttacaagattgcataccaatagacagactgtaaacataggaaattttcgttaaggaaagatgggtttactgtaattcaatcttttacaaaaaattacttgcaagttattgataacagaatttctcttttactttcttaattctcttgaaaattaaaccaatgtttccactttcatgagctaaagttcaaccatggtcaccttaggaaatacccctgtttatttgttaatcagaaatacaaatcgagtggcacatacttccattttcttcttaggccaaaggtttcagcttcattatattttacagaagaccttcagtggtccggtaagtctttcatgtcacaagctgaggtttaatgatggcagtggaggaaagcagaggtgatgcnaagtaagaccagccagttgcctatctgacatgggaatctttttcctgtctgggcttgcagcagcgaagtgttt

SEQ ID NO: 1537 - DNA, 301 bp, homo sapiens
  misc_feature (46)..(46): n=unknown
  misc_feature (203)..(242): n=unknown
gctttgcctagcttgcaggcagcgcagggcagacggcggcaggagnagcaagatgaatgcaggctcagatcctgtggtcatcgtctcggcggcgcggaccatcataggttccttcaatggtgccttagctgctgttcctgtccaggacctgggctccactgtcatcaaagaagtcttgaagagggccactgtggctccggaanatgtgtctgaggtcatctttngacatgtcttggcagcangctgtgggcagaatcctgttagacaagccagtgtgggtgcaagaatttcctactctgtt

SEQ ID NO: 1538 - DNA, 506 bp, homo sapiens
  misc_feature (255)..(349): n=unknown
ttgttcaaagtttaagcaattcattctctctgaacacacattgctattcccatcccacccccaatgcacagggctgcaacaccacgacttctgcccattctctccagtgtgtgtaacagggtcacaagaattcgacagccagatgctccaagagggtggcccaaggctatagcccctccttcaatattgaccttctctgggtttaatccaagttctttaactattgcagcagagacagctgcaaaggcttcattnatttcaaatatgtcaacatcttccagtgaccaacctgcttttgtaacagcttgctttatggctggaattggtcctattcccataatggaagggntccacacccacttgggaccaggaaactatccgtgctaaaggtgtaagtccacgtttatcagcttctgacttcttcataagaacgacagctgcagcaccatcatttattcctgaagcattggctgggggtgactgttcccgtccatcagtaagaaagt

SEQ ID NO: 1539 - DNA, 307 bp, homo sapiens
  misc_feature (48)..(48): n=unknown
gcaatagctgatcaaagaaacttcatatttgcatcatcaaaaaatganaagcctcaaggaaattattctgtaattcctccttcttcaagagatttggcatctcagaaaggaaatataagtgagacattgttattgatgatgaagaggacatagaaacaaatggaggagcagagaaaaagtcttcctgttttatcgaatggggacttcctggaactaaaaacgaaaccaacgatttgggatttctccacttccagtctttcaagaagtaagaccaagactgggagtaagaccttttaaccctggtaga

SEQ ID NO: 1540 - DNA, 429 bp, homo sapiens
  misc_feature (228)..(228): n=unknown
  misc_feature (395)..(406): n=unknown
ccataagatagttctaacatatccttattcttcctttcagcttcatgttatacatccagaacacgtgcattatgtagatgaaagagtacataatagcacttaaaagttaaaattatcactgttagcctaaacaacaacttaggtataaaaatccagacctctgctaatttactacaaattgtacatcttgacttattaaaaactccttttttaagattccagttgttntcacagggagacaaacaagatgtactataaaattcttggaaggatttgcttgattctactggaagaatgacattagccttctttgtagatgcatcttttttacatattatgcttcgtgtgttttgagtacgtttatgagagaaggaagaaaggcaggtggtagagcnaaagaggtganctgatccttttcgttgataagct

SEQ ID NO: 1541 - DNA, 417 bp, homo sapiens
  misc_feature (158)..(253): n=unknown
cagccgggagccactttgatgctgcgaaggccgtggaggaacagctgagaaagtcgttccagatccgctgcggcctggaggagagcgtgtccgaggggctgaacgtgccgcgctccaagcggctcttccgggacctggtgagcctgcaggtgccggangaacaggttctgaatgccgcgctcagggagaaattggctctcctgccgccacaggctcganccccgcacccaaaggagccacctgggcctgggcnagacatgaccatcttgtgtgacccagaaacgctattttatgaatctccacacctgaccctggacggtctgccccctctccgacttcaactccggccccggccttcagaggacaccttcctcatgcaacggacactgaggcgatgggaagcgtagaccccaaaga

SEQ ID NO: 1542 - DNA, 403 bp, homo sapiens
  misc_feature (10)..(33): n=unknown
  misc_feature (348)..(395): n=unknown
acaaaaatangaactaaccctccaggnatcttnggggtctacgcttcccatcgcctcagtgtccggtgcatgaggaaggtgtcctctgaagggcggggccggagttgaagtcggagagggggcagaccgtccagggtcaggtgtggagattcataaaatagcgtttctgggtcacacaagatggtcatgtctggcccaggcccaggtggctcctttgggtgcggggctcgagcctgtggcgggcaggagagccaatttctccctgagcgcggcattcagaacctgttcctccggcacctgcaggctcaccaggtcccggaagagccgcttggagcgcggcacgttcancccctcggacacgctctcctccaggccngcagcggatctggaaacgncttttctc

SEQ ID NO: 1543 - DNA, 440 bp, homo sapiens
  misc_feature (433)..(433): n=unknown
gagcctttggagagaacgctctggaccggtgagtgagccatgaggtcgggccacaggctctgaagtcgtgaagccttgggacggagcgggtggtgcttcgaggaagcgcgcccccggggccggtcccggagggctcgatccgcatctacagcatgaggttctgcccgtttgctgagaggacgcgtctagtcctgaaggccaagggaatcaggcatgaagtcatcaatatcaacctgaaaaataagcctgagtggttctttaagaaaaatccctttggtctggtgccagttctggaaaacagtcagggtcagctgatctacgagtctgccatcacctgtgagtacctggatgaagcatacccagggaagaagctgttgccggatgacccctatgagaaacttgccagaagatgatcttagagttgttttctaangtgccat

SEQ ID NO: 1544 - DNA, 506 bp, homo sapiens
  misc_feature (468)..(468): n=unknown
tgcccccttcagagcccatagtcacaggcctcagggctgttctgtaagtagagctctaggaaaccttgccagtctttctcactagtaagcagggctgagactgtgggatcttccttcatggctgccatccacagtttcagttttggagtgtggtctacacactcatttaacttcattgcttccagccgttcaaaccagggccagatgaggtaatcaatcatagagatagaattgccaccaaagaaggtcgtcttcttattagtcagaacctcctctagcttggtaaattctttacgaaattcttcttttaggccagcatagtcttctttattttggcttctaataaagcttcctaccaaggatggcaccttagaaaacaactctaagatcatcttctggcaagctttctcataggggtcatccggcaacagcttcttccctgggtatgcttcatccaggtactcacangtgatggcagactcgtagatcagctgaccctgaatgtt

SEQ ID NO: 1545 - DNA, 429 bp, homo sapiens
gtcaaagtttaggaaaatcattaaggaagaaattaacgacattaaagatacagatgtcatcatgaagaggaaaagaggagggagccctgctgtaacacttcttattagtgaaaaaatatctgtggatataaccctggctttggaatcaaaaagtagctggcctgctagcacccaagaaggcctgcgcattcaaaactggctttcagcaaaagttaggaagcaactacgactaaagccattttaccttgtacccaagcatgcaaaggaaggaaatggtttccaagaagaaacatggcggctatccttctctcacatcgaaaaggaaattttgaacaatcatggaaaatctaaaacgtgctgtgaaaaccaagaagagaaatgttgcaggaaagattgtttaaaactaatggaataccttttagaacagct

SEQ ID NO: 1546 - DNA, 572 bp, homo sapiens
  misc_feature (555)..(555): n=unknown
ctttctaaaaatacaatctcaaaattcatcaaaaactggaaactcattgtttctttcatattcaatttgctttgtcagaaattctttacttcttttgtcaattaagttgctagagaatagattgaattcaggaataaaataattctcaagtttttctgtcctgaggcactgaagaaagtatgtcacgcagttatcaaagcagaggcccaggtctttgcggtcccactgactgtcttgagggttctgggtacatacgtgaaagaaggcagttttcacatgataagaagagaatttatccagatgttttttgtctttaaacctttctttcagctgttctaaaaggtatttcattagttttaaacaatctttcctgcaacatttctcttctttgttttcacagcacgttttagattttccatgattgttcaaaatttccttttcgatgtgagagaaggatagccgccatgtttcttcttggaaaccatttccttcctttgcatgcttggggacaaggtaaaatgggctttagtcgtagttgctcctaacttttgctgnaagccagttttgaatgc

SEQ ID NO: 1547 - DNA, 431 bp, homo sapiens
  misc_feature (428)..(428): n=unknown
gcatgaagcaaaggattccaggctccagaaaaaatgaatgaactcaccttgacgtcaatgcaattgaatcaccgttgtcattcagcgagcaaccaatgtaggattgcccacagtttttctttttaaaggtggttttcgcccttcctctcccacattatttcttaatctgaacatgaaggctccattagcaacactaaaacttgatcattaacagccccctgtgcatatgagtggatcaaaccggttctgttctttcttgtgttgccatgttactatgcctcaagcccagtttgcttttgccgcagcgatggggccagtctcattcctccccaggagtgaaacttgcttcagctgaaaaggttgggtgcatgtcagtaaaaagggcttatttgtttcatttactttcctgcaaaattttcttcaaagcnaca

SEQ ID NO: 1548 - DNA, 619 bp, homo sapiens
  misc_feature (71)..(99): n=unknown
  misc_feature (596)..(596): n=unknown
ctttaatttttaaaaacacttcaatattttaatgtcctgaccagcagcagtacaaacactaaaagcaaggntttnnnnnnnnnnnnnnnnnnnnnnnnnccaaaacaacaaacaaaacccccaaacaggaaaaacaaacaaaaatcccccaaaccacatattaaaaatggcaggctttttataacaatagttaaagtaataaaaacatacaaaactttgttttttttttaatatatatacacagtacaaggctgaagcacctttgacttttctctcaaaatttacgtctgtatgaaaacccaacccactgtagtaacaatctggtgggtgtgaagctgtgtatacacagagctctgtacatgctccccacggagtaataaaaagctaccttcagtttgtgaattggttttatctttaggtaagaaagagcttttccagggaaaagcctttgggttgctttgtgtgctcctaggacttgttgctttgaagaaaattttgcaggaaagtaaaatgaaacaaataagccctttttactgacaatgcacccaaccttttcagctgaagcaagtttcactcctggggaggatgagactggncccatcgctgcggcaaagcaact

SEQ ID NO: 1549 - DNA, 521 bp, homo sapiens
aataacatgtcaaccccgctgcccgccatcgtgcccgccgcccggaaggccaccgctgcggtgattttcctgcatggattgggagatactgggcacggatgggcagaagcctttgcaggtatcagaagttcacatatcaaatatatctgcccgcatgcgcctgttaggcctgttacattaaatatgaacgtggctatgccttcatggtttgatattattgggctttcaccagattcacaggaggatgaatctgggattaaacaggcagcagaaaatataaaagctttgattgatcaagaagtgaagaatggcattccttctaacagaattattttgggagggttttctcagggaggagctttatctttatatactgcccttaccacacagcagaaactggcaggtgtcactgcactcagttgctggcttccacttcgggcttcctttccacagggtcctatcggtggtgctaatagagtattccaatctccagtgccacggggattgtgaacccttgggtt

SEQ ID NO: 1550 - DNA, 466 bp, homo sapiens
  misc_feature (6)..(320): n=unknown
  misc_feature (443)..(463): n=unknown
taaaancctggtcccaaaataaaagggccattaattgaagagaacgattttactttttcttgacaataaacagcattatcccnattattaggaataatgtaataccacctcattcttattatgtattataatcattatgtatatatgaacacatatataaaaatacagacactgcatggngactaagcaattttggaataaatccatagactaagtcacagcatgcataaatngtttatatcttaactgctcatttatacctgaacaaattttcattaagcatactgctaattttcaaatgatgtaataaaaaatctggnggcagtactgtattattttgctgaattacatttgagaaaaaagaagctacctgcttcatctattctaatatagtagatcctgggtcgtcttataagaatacatgtatagaaacttaaaaggancataaanttctcangagggngat

SEQ ID NO: 1551 - DNA, 571 bp, homo sapiens
  misc_feature (121)..(196): n=unknown
  misc_feature (344)..(376): n=unknown
  misc_feature (506)..(506): n=unknown
ggtggatctgtcggtcccgttttcccgtcgcacgtggtggccactgttggcttctgaatggtttgcaaggcggatatccacgccaaggcctttggatcggccgtgggtacatccgtctganccgttcctttccatcgcagagcggcggcctccggcggcgctctccagtcatggactaccggcggcttctcatganccgggtggtccccgggcaattcgacgacgcggactcctctgacagtgaaaacagagacttgaagacagtcaaagagaaggatgacattctgtttgaagaccttcaagacaatgtgaatgagaatggtgaaggtgaaatagaagatgangngnnnnnnnnnnnnnnnnnnnnnnnnnnnnnctgggactggggatgaaggagttggaaaactcgccaagggttatgtctggaatggaggaagcaacccacaggcaaatcgacagaccttccgacagcagttcagccaaaatgtctacttccagcagaccangtcttacgggaattttgagataaaattaatttagattaagctaatgttactgattccgtcataat

SEQ ID NO: 1552 - DNA, 616 bp, homo sapiens
  misc_feature (11)..(13): n=unknown
gatgacctcanangggtctctggtgtgtacaaagaaagcaaaaccaattttcccatgagtgcctctggacactcatgtaagagttacagatgttgactacatttaaacatttatcatgcttccaaaaacatatttgtaagagaaaaaaatataaaaataaaaatgtacaaagttctttattaaaataatagcttaaataaatcctctgtcaacaccagacagagtcagtgactggatctagactctagagcttagagctttttacatagttacatgaaaacatttgaatccgtcttcacagacagtgccacgatgacaatctggttaaaaccaataagccatcttccagatgcagcttaagagttcaggcgagaaaaggaactgaggaaaatgactgtacataatatggttctcattctatttgccttttttcgtcttggctgtcttctcctttctttttttcacatgtttagggattttgttttttcttttctctctctgggcttccttgaccatcttttttctttcttttttatcaatgtcagggtccgtggtgtgtttcttgggggcgggcatgggctccctgctcttcagagtctgtgtcagagcactcaga

SEQ ID NO: 1553 - DNA, 505 bp, homo sapiens
cgtagtactgacagtaccttaagagctctggagaccgtgaagaaagtgggaaaggttggcgctaatggtcagaatgctgctgggccctctgcagattctgtaactgaaaataaaattggttctccacccaagactcctgtaagtaatgtagcagctacctcagctgggccctctaatgttggaacagagctgaattctgtgcctcaaaaatccagcccatttctaactagagtaccagtatatcctccgcattctgaaaacattcagtattttcaagatccaaggactcagataccctttgaagtcccacagtacccacagacaggatactatccaccacctccaacggtaccagctggtgtggctccctgtgttcctcgctttgtgaggtccaataacgttccagagtcctccctcccacctgcttccatgccatatgccgattcattacagtacattttcccctcgagatcgaatgaattcttctcctttaaccagcttcctt

SEQ ID NO: 1554 - DNA, 544 bp, homo sapiens
  misc_feature (4)..(112): n=unknown
  misc_feature (408)..(529): n=unknown
ttanccccnatcaatcatccatcagacatangcacaccaaaatgcactcagtaatggtataaccaagatgcagcagcagaaaacaaatacattaagcatgacgccgaaaggntcagtttctttacctctccatttcttagttcaatttccttgcttaaaaggtttaaggtaaggtgacggccttcatccagggaattccacttctgttgcatggccaaagcattggcctctctctgaagaagtaatgagttgctcttggcctgctgaagttcaaggctcaaaaggtccccagtactggaatgctttctatgaccagataaatcagtaacaatgaatctgtccctttcaacatagtgtgctgatgatgtggcctcgttgccatatgaactccaccttgaatcaacagcnttgacatnagggacataatctgatacactgatggggcttagtcgcactttccttgggaagcngtggcctggacaaggatctgtggtatggnaaacctgtacggggaagatcnggaaatcgnaccccattttgagat

SEQ ID NO: 1555 - DNA, 368 bp, homo sapiens
  misc_feature (331)..(331): n=unknown
cgccacaagctctacaagctgatcattagccagctgctatatgacggctacatcagcatcgccaatggcctcatcaatgaaatcaagcctcagtctgtgtgtgcaccctcggagcagctcctgatctcatcaaactcggaatggaaaacgatgacaccgcagttcagtatgcaattggtcgttcagatactgttgcccctggcacaggattgacctggaatttgatgcagatgttcagactatgtccccagaggcttctgagtacgaaacatgctatgtcacatcacataaaggaccatgccgtgtaactactatagtagagatggacagntaatagtactggggctgctgatgcttcgataaagata

SEQ ID NO: 1556 - DNA, 424 bp, homo sapiens
  misc_feature (86)..(86): n=unknown
  misc_feature (389)..(389): n=unknown
attcttgaaaatgcttttgataatggcataaaactcaggagtctcagagctgcatgcctgcttatctgttcaaatatacctggaanggaaatacacagagggttcagcagaataagcaagaaagttgacagaagaaccaaatgaaaattcctcatgtcaaaagcactttaatgccctatcctccttcaatcaagagatcaaaagaaacggcaagtcctgtacttacaaaaccgatgaaaatcacactgtaataatcagtgaatgtagaactgcacagatctgtgtttccaactttttccaccatgattctacatcaaggtaaaaaaagattcttttatacaaatccaagaagaatgtggacagaggtgggcagcaaaacgtccaggatngtgcacggacttacgactgcagctgagacaagacg

SEQ ID NO: 1557 - DNA, 345 bp, homo sapiens
gaaaaatcctgaaatggaagatttgccatctaaaggagtccaggaggaaaggctgggaactgagcccacttctgaaacacaggatgaattacaaaggctgctggggttgctaagagaccaagatcccctctcagaggagcagatgcaaggactgtgcattgaactgaatgatttcattgttgctctatcctcagtccaaccctctgccaaaagggaaggctttgtcactgtccctaatgtgacatgggcagatattggtgccctggaagacattagagaggagctcacccatggcaatattggcaccagttacgcaacccagaccagttcaaagctcttggattg

SEQ ID NO: 1558 - DNA, 582 bp, homo sapiens
  misc_feature (255)..(256): n=unknown
ctttttcttaaagaggaagaaggcattttcacacaaggctggccagatgggaagaatcttcagcttcagcttcagcttggcctcattcatttgaaaataaaatgtttacatgaggccgcgcctgtgtccagctgaaagtgggtccttcagagcgtgtgggggattctctgccggcttgatgggctagctcctctaagccggctgctggagacatcaccggctgagggactcctgcaaacgttcatacatgatttnntccttttttgatatagatgatcttactttcttgaaagcttcttcaaaatgcttatgactaaccttgagttcacctttttcatttccactcttctgtcttgccatttcctgtctcagggcacagatagaagcttctcgtaccaaagcagagagatctgcgcccgtatagcaatcacagcgaaggtcaccagcaattgcttccaaatttacatctgcatccagtggtggtttggtaccattttttgtgatagtttttaagatggcaaggcgatctgcagggggcggtaaacccacaaacagtgttttgtccaggcgggcccgggcgca

SEQ ID NO: 1559 - DNA, 389 bp, homo sapiens
ggggtccaggagggcagggaggggctcgggaactggccatccatctgattcttgcctctgtgcccagggctctctgtcccgccgactcctgcccccattctgcgggcagacctggccgggatcttgggggtctcaggagtccttctctttgactgtggctacctccttcatctgctgtgccgacagaagcaccgtcgtttcctgctgtgactaagtcagcaacacagttcctctgacatgggccttggctgtgcttctttgggggtgaagagattggggaggaagtctccacccctgggaggcagaagccaggcatagcgcgctggctaggactccagtaccgtgaagggaggcagtgagagcagaatctgtgcctcattcctgatctc

SEQ ID NO: 1560 - DNA, 120 bp, homo sapiens
  misc_feature (14)..(115): n=unknown
gacagccagcatanagattggaaaatgtggannangagaaaangggtgtatngtaagnanaataaattgtatttttccatncttggggaggatanatnanctctttgcaatgntntaata

SEQ ID NO: 1561 - DNA, 424 bp, homo sapiens
gtcctgcctggacaatgcaactgaggccctcccggcagactcaggcccaggtcccaccccagatgagccctgcataaagtgtccagagaacctgggagaacagctggagagtttggagccagaggatccttccctgagaatcaccaccgtcaaaatccagacggaacagcagagaatctccttcccaccgagctgcccggatgccgtggtggccaccccacctggtgccagcccacctgtgaaggacaggttgcgcgtgaccagtgcagagatcaagcttggcaagaatcggacagaagctgaggtgaagcggtacacagaggagaaggagaggcttgaaaagaagaaggaagaaatccgggggcactggctcagtccggaaagagaaacgggagctaaaggaaaccctattgaaatgcacaga

SEQ ID NO: 1562 - DNA, 437 bp, homo sapiens
  misc_feature (2)..(113): n=unknown
  misc_feature (292)..(425): n=unknown
anacttttnnctgttctaaatgacaggnttttaagcattttttcctatatataatacagcatcacttaaaattntatttaaagacagttgattcaggcctgccttggactggnaagaagtctttaacttagtgggattagtgcttcagcttggtcccaaatattttccccattattgtttctcaaaactcatgtcatagatgggttttacagatgatggttttacagatgatgtcaatgctgtttaaaatcaccgaagactgagttgggcctggtaatattggagagaactnaaggcaangatggnttaatccccaactgctangtattggataagagatgatggccangagtttaggtcttctcactcaccaaagncatgtnacccataggacagggccctgcttccttgantcatcttccacnaaagtctaaaca

SEQ ID NO: 1563 - DNA, 357 bp, homo sapiens
ggccgcagccctcgtactgatttccatcgttgcatttacaactgctacaaaaatgccagcactccatcgacatgaagaagagaaattcttcttaaatgccaaaggccagaaagaaactttacccagcatatggggactcacctaccaaacaactttctgtcgttgtgccttcatacaatgaagaaaaacggttgcctgtgatgatggatgaagctctgagctatctagagaagagacagaaacgagatcctgcgttcacttatgaagtgatagtagttgatgatggcagtaaagatcagacctcaaaggtagcttttaaatattgccagaaatatggaagtgacaaagtacgtgtga

SEQ ID NO: 1564 - DNA, 299 bp, homo sapiens
  misc_feature (11)..(291): n=unknown
aatgaaatganatgtgacactgaagcatannaacacaactgaagactncnaacaacctaattcattttccgagtttgcncaagnctccaggcaccagtnaaatntcgaagtcgtataaaaagtaggtctttacccatttgtagccagctccngaatggaactnatttagaaccttcaatttctgtccagttganagcaatttctgctattggaattttaanganctgtgctatgtacagtagttctncatcanatgccnatcgttcaacgtgtacagatgaaaacgtccgngaagctgc

SEQ ID NO: 1565 - DNA, 321 bp, homo sapiens
  misc_feature (287)..(287): n=unknown
tggaccccagcggcgatctgtgtttgggttcgcgctctgggagaattttggctttgctcgccttcctctttcagaagactcgaaatcggccagcaggtctgcgagatttgaaacgcgactgttactccttgttttccggttctggccgcgggagcctctcgagaagcgtggaaagaggagaagggcgtataccttgtgaccgcctctggttgtcttgggctcgcgcctggcgccgcttacgtggagtcgctctctcgtcgtcacttttggctgccgacttgttgagnagaagtgcagactgatgctttaagactcagggag

SEQ ID NO: 1566 - DNA, 472 bp, homo sapiens
  misc_feature (34)..(98): n=unknown
  misc_feature (252)..(252): n=unknown
  misc_feature (417)..(471): n=unknown
atgttatctcctctgattccagcaattcaaatcnggtgaggtagcnagggcaagtatcacatttttttaatancangangggangctaatnaatgtanatgtaacttactcaggctgaaacactgaagaaaaatttgtgactctcatttcagtgatgttttctgcattattaaaaaatattatgctactcctcactatattatgttgatggttgaaatgtcattataaagcttaatttatatgattctcttnatgaggatgatgaagcaaatgctccatcaactcactagtttacaggggcaagcattttcctacatttcacacataatttgattacctctgtcctaagtgaataatctactatctgggtatgagaaacatgatttggaaacactaaaccactatattatttcaacnaagaaccatctttcacacctaagtaaaaagggacttcaaaaaaagtcctaaccna

SEQ ID NO: 1567 - DNA, 176 bp, homo sapiens
  misc_feature (25)..(170): n=unknown
cttcattgttgagatgctgcccatngaaaacagattgggacatagattttggaatcaaggtctctgctcctggnanctcctctgtgcgtctccctctgcctttnctccctngggactgtgggcaggaggagcttcttcggaggaccgggagtgggcctccagtccccctncccctg

SEQ ID NO: 1568 - DNA, 531 bp, homo sapiens
gtgtcctgaactgtccccaggcatcctgccccccaggtaagcccaggcgtcctctcaggagatgctggtccttgcatgtgggcagcagggctcctggcatctggagtcctgggatgggcgggtcttcccggagctccgggaaccctaaaggggactctggtctcccaggtttcacaggagagacagacagaggaccaggggagcgagggaggccagcaggagcccccagtggcgatggaggctggaagccccagaggagtagccgtaatgggtcctgcaggagccacccagctggtccagcgggatgggctcctcctcgggagcctgtgtgaggttgctggcctgttccacagcctcgaagaccctcagcaggttgtcagccagtgcgcccttgacctccgcctccgtccagttcctcctgagcagctcagcgatcaggtctggatacttggagacgtcctccagcccctcagggacccttggaacaccatcaaagtccccaccaaaacccacggctctggctcctgcact

SEQ ID NO: 1569 - DNA, 68 bp, homo sapiens
  misc_feature (23)..(64): n=unknown
ctcatcttgatctcattcgtttntttcagcttaatttatatattctttcctattgaggcttaantttt

SEQ ID NO: 1570 - DNA, 275 bp, homo sapiens
  misc_feature (112)..(215): n=unknown
atttaaactgccacatgcagctggtggccgctacacaggacagcagaccaacctcgagagaaatacaacaaaagacgtaacgtgggggtcaagtcacagttagggtgggttnnnnnnnnnnnnnnnnnnnnnnnnnnnnnnnnnnnnnnnnnnnnnnnnnnnnnnnnnnnnnnnnnnnnnnnnnnnnnnnnnnnnnnnnnnnnnnnnnnnnnnnnggaactcatgtttggaagtggaaccctgcacgctctctgtgctgctgataatcgagtgca

SEQ ID NO: 1571 - DNA, 521 bp, homo sapiens
  misc_feature (282)..(298): n=unknown
atgaaaacattcattattacatttccttgtgtgtttcaaacagacattggcaccttcctattgagttaattctctgcatcttttgcagcagcagcccgcaaggagattcccagagatggctcccctaacacacagtcctgtgattttacagttctatgacttacagttgatgattcacaagattcaggattctacaagactcaagggggaactaaactttcttacgattgtacatgatcagttatagggctgtaatcattaattgttggcttcaaatgtggnnnnnnnnnnnnnnnnntcatgccaaggagggaatggggtgtttcaagtcaggcagcgatgattctggaaggttggaaatgtaaggttagaagcttggctggtcttagtaaacttgttcccttgctcccacccaagaagaggtaccaaatgtgagacctgagatctccctccaatatctgtcctctgcagttccggggaaactaatcatggaagtacacatgcagcagctcctccaactt

SEQ ID NO: 1572 - DNA, 445 bp, homo sapiens
  misc_feature (62)..(62): n=unknown
caatccaaaatggatatttcacacaacactacataaacaacatgaacacagtatcaccatanggagggactttcaaatatagacttacaaaaatccctgtccttttttttcttttaagttattatactaagcatgacaagtaatcatcatttacagtatggtacactgacacgataaaaaccatgttacaaatgtgctgttataaatcagtaacattagggaagacatttcatgaactgtaattatttcatatgaaatactatacaatataaacagaacatccatcttggatgacctttacagcaaccagagaccaagtaatttaaaattttttttcagtgcaaacacattttattcaaggcagtcttggctgcaaaactcctttctaacatacagtaaatcccacttgcacgtcttaattcatttacccctaatgcaatagtca

SEQ ID NO: 1573 - DNA, 510 bp, homo sapiens
  misc_feature (52)..(114): n=unknown
  misc_feature (357)..(434): n=unknown
ggtctttctattttatgtctcaacttagtggaacaggcagtgttgagaagtnnnnnnnnnnnnnnnnnnnnnnnnnnnnnnnnnnnnnnnnnnnnnnnnnnnnnnnnnnnnnnntggaatcatagtaggactttagagcaaacttagagacttgagaggaaacttagagaagagctgaccaaacctcttaggtgtcaaaataaggcaatgagtgagggtagaaatgaggtgaagcagaaagggtctgcatgaggtcaaggcccaaggtcatctgcacatccctgcaaaacactgcctgcctgtgctttggtttttgagtctgtaaaatggacatttagagtagatggccttaattantcgtccatccacagatttcacgtttctggtttctaccctgtacgtcagtnggattatttaatttcctgtggtagtangattctacctgacccaagttccaataaaggaaaataagtgtggtcctttcggtccttaggaggtttccattcccag

SEQ ID NO: 1574 - DNA, 591 bp, homo sapiens
  misc_feature (284)..(416): n=unknown
  misc_feature (528)..(528): n=unknown
catgtgctttttttatacaaagcactttcaaatacattacattatcttaaatttataataggagtttctttcggattcagtttaaaaatgacaaatagcatttgttgtgcccaagttagaattacaccaaaattaccatgtgctggcacataccatcatcccactggtggctggaaaactgggttgcaggagtgtctgtcactgagatgggccaccaccccagtggccatatggtagagatgagggaaggatggactagaagcaagctgggtcttctgggtcgnctctactcctttttcacttcatcaccgttttccccactgagcttgaacacaggnatctgctgnccatccttgagntctaaaaagacctcgtcaaggngccacctctgaaagggncccctctggatgagtggncgtagagaaggccctctgatttggatccagagacaggaatcttcaacttggcatcaacaatgtccacgaagtttccctgtcgatgagcttgagataatggatgttgagaggnggggccagagcttcctgtgcctcgggatggctctgcagctgctccactgccaacttgtaatat

SEQ ID NO: 1575 - DNA, 445 bp, homo sapiens
  misc_feature (42)..(42): n=unknown
gtcggtggatctataattttaacatcaaaggcaaagaatatngagaggaagagagattatacattatacgtaaatctatgaagatgtcaaagtctcaatttgatagtctagaagatcatcagaaagaaacttttcttaaacgagagctctggatcaaggagaattatgaggtctacaagcaagaacaagaggaagaattaaagaaaaagttggcaaatgaccccagatggaagagatacaggagatggatgaagaatgaagggcctgggcggttaacatttgtggatgactgaagattgatggaatgctactatgccaaaccttaattgtgatattattttcataactgaattattttagaaatgtatcaattgactgctgctcagcagtaactaaaattcctcaagtatttgattaaacagaataatgtcaaaatttaaacctt

SEQ ID NO: 1576 - DNA, 457 bp, homo sapiens
  misc_feature (388)..(435): n=unknown
taactaaacatataaaaattttaaatggcaactaataaatcttcatgtgaaatcttttaacaaaatccacaaatagattataaaaattgaacaatcataaatgtcttatgtataaagttttaagggaaggtttaaattttgacattattctgtttaatcaaatacttgaggaattttagttactgctgagcagcagtcaattgatacatttctaaaataattcagttatgaaaataatatcacaattaaggtttggcatagtagcattccatcaatcttcagtcatccacaaatgttaaccgcccaggcccttcattcttcatccatctcctgtatctcttccatctggggtcatttgccaactttttctttaattcttcctcttggntcttggcttgtagacctccattaattctccttgntccagaggncccngtttaagaaaagtttcctttct

SEQ ID NO: 1577 - DNA, 432 bp, homo sapiens
ggacagagatgaggcctgctttgacctaaatccctgtcctgtgtacaaggtcagtgataggttcagagatgcagctgaggagcttaatgcatcctccaggccccaaacctgggacgaggtcactgttgaattcaaacctggtctttttcatggggttggcttccgatccacaagcccctttggaattcccgaagaggcttctgaaatgcttgaggcaaagcccaagaacctggaacttagcccagaaggagaagagcaggaatctttgcttcagcctgatcagcctagtcctgagttcacatttcagtatgatccttcctaccggtcagtccgggaaattcgagagcatcttagggcccagggagagtgccagagtctgagagttggtcctgcagctgcatacaatgtgagctgaaaattggttctgaagag

SEQ ID NO: 1578 - DNA, 460 bp, homo sapiens
aatagagaaccatatatttaaacaacgaatagcagggtagcttacttaggtgacacagttcattgaaaacttaatactgaaaaataccgcaatctggacagcaagacaaatatcaacaaatgtgttttcagttttgatattcatttggcatccacaaaatgatccagctcaaaacaagagtttgacaaagttaacatcagcattaaaaaatataagttacaacaaaaaaacagactgtgaacaccaaagcactactcagggctctttgggaacataaggctgatcagcggcaggtggttaatcatattaactttgttgtcccacctcaggatcattttggttgtctatttgggcttgtagttgcttagctaactcctcaaattcacgaaatgcagaaataagcggctcaagactggaaatcatcatcaattaaggacatctttccactttttaataatgt

SEQ ID NO: 1579 - DNA, 501 bp, homo sapiens
  misc_feature (472)..(472): n=unknown
acttttttcagataaaccagctttttatgtaaagagtaagggaaaaagttaaatctttaattctgacctgccataaatacccaaagatataaactgtcttccaccacccccctcataactaagacatccttcctgagtcactcttaatcatgaaacttgattttctcaattggccagtcttctgatctttagtatctctttagttcagtaatttttacctacctacttgatttattttcctttaaaaggtgaaatgacatttaaagaaaaacaaacacccatcattcctcagtcccaacacagcagttcttttcactcttgcttgtaactttcaggccttacccacatgtgttcctagagttgcatgtagctaaaattatagtgtgctgcctaactttgtgctaataacgaaggacacacattatcattggcctctcagtgggatgggcactggacccccatttttcccaanggatctaattttccagtggaattttggtc

SEQ ID NO: 1580 - DNA, 549 bp, homo sapiens
  misc_feature (507)..(519): n=unknown
caatgaatcatatcagagttcatgggaatcataataaatgactagtaaaccactcacaaaatcaaagctatcaacatactaggatcacacacattaattagtgctatagttcaaaacataccctttaacttatttagcacgcaaaataatcataaaagtaatgtctataagctctaaccaaaaattttaaaaattaaaaatagcacaattctacaattctgattttaccaagaaaataaaccttttttggcacatattatcctatgaaaatggaaagctgagtcaggctgctctgcttttcacagcacaaataagcattcatgctatcagacttgggaaattaactcggtgacaaaaattcactggaaaatagaatccttggaaaaatggggtcaggtgccatccactgagaggcaatgataatgtgtgtccttcgttattagcacaaagttaggcagcacactataattttagctacatgcaactctaggaacacatgtgggtaangcctgaaagttnccaagcaagagtgaaaagaactgctgtgtt

SEQ ID NO: 1581 - DNA, 207 bp, homo sapiens
  misc_feature (52)..(166): n=unknown
caggctatgtgatggcacaaatagatggcctctatgtaggagcaaagaaganggtatttagaagggacaaagccatgancctgntccagattcagttctgaatagtgttggagatctattggatctgattccctcactctctcccacaaaaaacggcagcctaaangttttaagagatggggacatggggacattgctccgctctta

SEQ ID NO: 1582 - DNA, 494 bp, homo sapiens
atgggaaaaacatagctaaaatagtgcctttggtatcttatttacagtcttctagtccgtcatctccctccttcattttatatcaagtttcaaaattggtttcatggtaataaaatcaaagttgtagacctctggcatgccctgatgtagagttttgttgaaacggtcccagcgaaaaacagggaggccaccttgtactgtgggaccacttatggcataggatgtgtactgagatgctaggtagatatctgccacctttgtgtcataacaacctccaggacttgggttaggtgagttcaggtcctcacggcagcagatggtattacaggggtcacctctactgtaaggatccttcttataattgttgtatcgcatgatatatttcatggatgccgtatcagtcactttcccttggtcacgccggaaaattttgggctcgtgggagctaaatcataagagtagtccaaagcccagcttctgaactaacagtggat

SEQ ID NO: 1583 - DNA, 433 bp, homo sapiens
cagctctacttcgcccgagctaatgagagagtaccatgctgcgccttcagccccagaaactgaagccccatgtgttcactgtgggtgaacagacctacaggaatgtcaagagcctgattgaaccagtcaaccagttctattgttgtcagtggagagagtggtgctggaaagacatggacgtctcgctgcctaatgaagttctatgctgtggtggccacctcacctgcatcttgggagagccacaagattgcagagaggatagaacagaggatcctgaactccagccctgtcatggaagcttttgggaatgcgtgtacactgaggaataacaacagcagtcgctttgggaagttcatccagctccagctgaacaggggctcagcaaatgactggagccgcagtccagacctacctcctagagaaaactcgagtg

SEQ ID NO: 1584 - DNA, 601 bp, homo sapiens
aaggcggtagcactagttctctcttctgatcatgcggtaccttgctctctgcccccatggatcacttactgcattctgtactctagcactgtgtatgcatcactcttccttatgccccgtccaccccaccacctggtctccagactcagcagaacagaggtgactgattccttggaggtagcacagaggggcccaaagtcctagatcctcagggaaagaccaactccaagtccagggaaaagctctatgcaaagggctgcccgtcatctctgccaaacttaagtggcgtggcttttcttctgaccttaaagatgttgttctgggtaggggtgtcaatgcccaaatggagcatggcctctctggtcacctcaaaacaatcctcttctaagctcctctctgggttgggcagccaggagaaggcagctccctcaggaaggtgccactggagcctctcgtcctcactggctcctttgcaaatctgatagaagatgtggaagttcctctcactggaagcctggcaggccactcgagttttctctaggaggtaggtctggatgcggctccagtcatttgtgagccctgttaagctggagctggatga

SEQ ID NO: 1585 - DNA, 464 bp, homo sapiens
  misc_feature (56)..(58): n=unknown
gaaaaagaaaactgataacacaaaaggcaggatgtagaggaggctgttttagccannngggctggggagggctggccctgaggaggcactgtgtgacctgcgatctgaatggcatgacggacacgccacgctgacagctgagcaaagaagcatcccgggcaggggcacagccagtggccggggcaggcacaagctggatgtgtgaagcagcaaggtgtccgtgggaccaaggcccagcaagcaaagggagagtggcagagaggctggcggacttggagcctgcagagccctgcggaccactgaggatctggagttgttcccaaccagcttttgaaggcttttaagtgggggatacgtggcctttggttgtgctgttaaccacttccgcttcttccccagcaaaaaagggagacgctgttcccgctgtgctcattcccatgtgacatctccccgggagagcaaca

SEQ ID NO: 1586 - DNA, 80 bp, homo sapiens
aaaataataaataatatgaaacagactgataacgctgagctgggcaggcccaggccagtctagtacaaagttaaggaggt

SEQ ID NO: 1587 - DNA, 433 bp, homo sapiens
  misc_feature (358)..(358): n=unknown
gtgagtggctacgatgagaacatgaacacgatccgcacgtaccaggtgtgcaacgtgtttgagtcaagccagaacaactggctacggaccaagtttatccggcgccgtggcgccaccgcatccacgtggagatgaagttttcggtgcgtgactgcagcagcatccccagcgtgcctggctcctgcaaggagaccttcaacctctattactatgaggctgactttgactcggccaccaagaccttccccaactggatggagaatccatgggtgaaggtggataccattgcagccgacgagagcttctcccaggtggacctgggtggccgcgtcatgaaaatcaacaccgaggtgcgganttcggacctgtgtcccgcagcggttctacctggccttccaggactatggcggtgcatgtccctcatcggccgtgc

SEQ ID NO: 1588 - DNA, 522 bp, homo sapiens
  misc_feature (470)..(490): n=unknown
aaactattaaaagcagcaatgaagcatatagaagtgatagttaaagccagacagaaagtaaaaaatacagagtttttacagcaagctgctttagaagaatatggtccagagcttcatgttgctttgagaagtcgaagagatgaattgcactatttaaggaaacttactgaactgctttttccttatattttgcctcctaaagcaacagactgcagatctctgaccttacttataagagagattctgtctggctctgtgttccttccttctttggatttcctagctgatccagatactgtgaatcatttgcttatcatcttcatagatgacagtccacctgaaaaagcaactgaaccggcttctcctttggttccattcttgcagaaatttgcagaacctagaaataaaaagccatctgtgctgaagttagaattgaagcaaatcagagagcaacaagatcttttattcgntttatgaactttctgaaacnagaaggcgcagtgcacgtgttgcagtttgttg

SEQ ID NO: 1589 - DNA, 549 bp, homo sapiens
  misc_feature (393)..(393): n=unknown
  misc_feature (541)..(541): n=unknown
taaaatttcagacagcgatgtacataatatatataagaatatacccaaaaaagtaaatttctaccaccctcgcacagcagaaatttcaatgggttattctataccaaatccaagtgtttacatccaagatgtcacagaggtaacttccttttgtaccttattgagctctggaaacagttcctgtatcacaatgtccaataaaacataagtcagctgcttgttgagtactggttgctgtaagccatcaaacagaagtctgatgctttcatacttggtttcttcaccaatacacttgactaacagatctggaatgtaattcatcatttcttcaaaagtctgttttgctcctttttgcttatcttggagagagcgaggttcagtgttttcacagantatagcatctctgagaagtgttatgagtgagaccaaacggtgctcctgaaatagctgttccagtttacactgaaagatagtaatcagtatacatttccagggtgtttttaaagaggattcgagttcccattaaggagatgatggaagncagtcagg

SEQ ID NO: 1590 - DNA, 499 bp, homo sapiens
  misc_feature (487)..(487): n=unknown
ggagcccaagaccatcactgacgagtttgagcaggtgagggccccgccccctctcttcccgctgctagggttggggtagagtccccaggctccaggcagcccctgctggcctctgctcccttgcctccacctttcagctggcgcagtccctcagcctgaccaagtactcctccctctggctgtctgctcagcctggaacaccgccctctcatcctccacttggccagctcctaggcctcctgtaggtctcagcccaaatgtcccttcctcaaagaaaccttcctggagccacccagcccagtgcctcccctttgcagtgctgggcacactcgcctggggtgtgggattttcccagtatgtgtccctgcaccaggctgtgggctctgtgccgagggacttgatgggccccattcaactccaggtcccagactcagcagggcagggctcatgcggaaatatttttttgatggttctcaagttctaatangggaaattctgt

SEQ ID NO: 1591 - DNA, 140 bp, homo sapiens
  misc_feature (31)..(138): n=unknown
aaataggtttaccaaaaaatgtccctcactnatngnaaagangaagnggcagccctcgcncccgggcccccagggnggggctganaggaaaacctcnccggcacnctncntggttcctgggaganggggatgnnccgngg

SEQ ID NO: 1592 - DNA, 407 bp, homo sapiens
  misc_feature (157)..(157): n=unknown
  misc_feature (324)..(367): n=unknown
ttcctgaactgtatgtggagaaagtgctggagtttttagcttcctcctttgaagtgtctcgccacctggaattctacctcctctggactcacaaactgctcatgttgcacggacagaagctgaagtccagagccgggacgctgctgcctgtcatcanttcctccagaagagcatcccagcggcacctggacgacctgtcgaaactctgtagctggaaccactataacatgcagtacgcatagcagtttccaagcagcggggcacaaaacgctccctagacccgctgggaagtgaggaggaggcagaagcatctgaagatgacancctgcatctgcttggaggaagaggcagagactcagaaggaganatgctggcctagagccagccgggttgcagcgttggattgt

SEQ ID NO: 1593 - DNA, 589 bp, homo sapiens
  misc_feature (89)..(89): n=unknown
  misc_feature (408)..(467): n=unknown
  misc_feature (574)..(574): n=unknown
ataaataagtctcatacaaagttcatgtgaatacctctctgagacgcattttcaacattcatcaccgttcacacggccccgctcctggngccaggtgccagtgcgtgccggcccctggcgtgacccgtcggctcgctgtcctgatgggctacatgtgtgcacaggaaaagcaagtcactaccactagtgacagtatttcagctgttctctggacccctcctctttgctggcccaggtggcacaagggtcccatctccctggcaggtcttagccggcacaatccaacgctgcaaccggctggctctaggccagcatctcttcttctgagtctctgcctcctcctccaagcagatgcaggctgtcatcttcagatgcttctgcctcctcctcacttcccagcgggtctanggagcgttttgtgccccgctgcttggaaactnctagtgcgtactgcatgtatagtgggntccagctacagagtttcgacaggtcgtccaggtgccggctggatgctcttctggaggaactgaatgacaagcaacaacgtcccggcttctggacttcaagttctgtncgtgcaaatgagcag

SEQ ID NO: 1594 - DNA, 434 bp, homo sapiens
  misc_feature (34)..(131): n=unknown
  misc_feature (357)..(387): n=unknown
ggaggctctgctcggatcgaggtctgcagcgcanttcgggagcatgagtgctgcagtgactgcagggaagctggcacgggcaacggccgaccctgggaaagccggggtccccggagttgcagctcccgganctccggcggcggctccaccggcgaaagagatcccggagtcctagtggacccacgcagccggcggcgctatgtgcggggccgtttttgggcaagggcggctttgccaagtgcttcgagatctcggacgcggacaccaaggaggtgttcgcgggcaagattgtgcctaagtctctgctgctcaagccgcaccagaaggagaagatgtccatggaaatatcccattcancgnaaccttcgcccaccagcaacgtcgtangattccacggctttttcgaggacaacgacttcgtgttcgttggtgtt

SEQ ID NO: 1595 - DNA, 427 bp, homo sapiens
  misc_feature (49)..(65): n=unknown
  misc_feature (292)..(292): n=unknown
  misc_feature (399)..(424): n=unknown
aaaggacagttccgaattcaatagaaatattctgtacaattcatatggnggggttnaaggngganggggacaaggctgtagaacccacacccgaacatgtacaaaaataacttatacagcaacccccacctgcaaggatgatgcagctctgcccagccaccggggctggggggcacactgcagacatggcaccgcgggagccaaccagtatggggccccagatgcaggtgggagtgaagagggcaccattccggaagggagggcagtattaggaggccttgagacggttgcnggccgagcgtgagctcagcagcttgtccaccatagtgcgggcgtacggagccggctggccagctccttgcagcagccgtactcctccaggagactcaggcggtatgngcggaagtcccgctttctcgtcgangta

SEQ ID NO: 1596 - DNA, 475 bp, homo sapiens
  misc_feature (433)..(433): n=unknown
tcttagtaaaagatactcatgaaaaaagcagttttattttcctaacaaaaaagaaagagctcattatgtcagtgtctatgaactgtacccatcccaactctcaaatcgtttggttttttttatcttgattgagatcctcttctcactatgctagtggtggagatattgacaaaatcctatttctttcaaagaggaacttttcacaccgaaaaaagagcatggaattattttatattgttataaaaatcccagatgcaaatttttttaatgccaattattagagcttctggggaaaaagtatagttcacggaaataaaactatgttctttcagggttgggtggataggtggctgctagggtgtctggctcctggcggctttgccatcccatgaggcaaaggctgggaacacagtgtctttgcctatggtagatncatgtgaatgtcaggaagccagctcttcagtcttggagatga

SEQ ID NO: 1597 - DNA, 477 bp, homo sapiens
  misc_feature (352)..(429): n=unknown
ggatacaagtatttacaatgctattggagtcaattattgacaacactttgcaacagtaataccatttctagcttttcaattggcaatacttagaaccttactgtagtgacctgattttaaataccatattatatttactaagttaagagctagtttttactctcttccataatttcattacatgaatgtaagatgatggctcaaaaatgacgacttatagtttgaatttatgtgtatgcaatatacatatgagaaccaaattcaacaagtgacatgaatgttactacatgaacattgaattgtattgcccttgtcagttatttcctctggtcaataaatactgaaggtcacnaacacctttttacttttcaagagtttgccttctcntctcgattttagtaattaantnggatattttcctcccatgcntcttcatctgatttagtgggatgtttcaataccagcaaaaccaaaagg

SEQ ID NO: 1598 - DNA, 404 bp, homo sapiens
  misc_feature (199)..(214): n=unknown
gtgtttctgttacctgaattccaagggcagaggggtgattgagggggtaagggaaaggcacaggtgaattttatcttcagatgtctaataggacagtgtgacattgcccagagatagtctctcaaaggtagtgagtgccagcagaacttctcgaatgcgaagttgagaaattttacttatttacttattttcccattgnnnnnnnnnnnnnnnnctttaaatgttttctgagttaaaaaggcctctgactggtagtcctgacacagcttcttgagagtctccgagagagcctcttctcagtacaattcctaagaagataggaagaaaaaaaaaaaatattcttaacacataaaactagaattagtgggaagaaatgcctactgtaaactcaacagaaccggggt

SEQ ID NO: 1599 - DNA, 529 bp, homo sapiens
  misc_feature (522)..(522): n=unknown
caagccgcatttaaaaagggcatctgttcagctccatctgcttgctgcggtgcaagaatgctaaaccaggattaccagttcttcacattttttgaaatccaaattttcatgagaaacattctcatttttaaatatcaagaagtgattttaaaatgtttaaatggtgctggttaaacaaacacgtctgcagctggatttagcttgcaagctgccaagttgcaacctctttcattctagaaacttctgtcattttcatcatagcaagtctatgcggacaaaagcctccaaactttccaactgtgtaggccagtacagctggcaaggttcatagaatataatggctatccccctctgccaaataagactatccacaacccagctcagacacagtggttatatgattttgtgtccatacaggagaggccttggtgtcttcacatacattctctgagccaacatctatccagcagccctgacctcctgctataatttaagtctatttccttttaatctaataagagntggtagt

SEQ ID NO: 1600 - DNA, 391 bp, homo sapiens
  misc_feature (14)..(14): n=unknown
  misc_feature (171)..(171): n=unknown
gacttctgcatggnatatttggctttacaaacgttaatgcctagttaatgcttgtgttatatggtacacatcattacaatctgttggccagtaacagcttttgcaacatgggttaatactaaaattgtgaatcatggaacttttacttagcacacacacacacaatctacngcaaacttaaatactaatctataatacctaactgggttattggatccattgcaagattgtgcttatttatctcagaaggtaggcaactagcaaaaatacacatttctttcgcatatccccacccccatattacactgtaaaagaaatacattattcagtgtacttcctaagaaataaacttccttaatagtaacctctctctatatatatctatcccaaa

SEQ ID NO: 1601 - DNA, 295 bp, homo sapiens
  misc_feature (222)..(275): n=unknown
ttcagattgatgagttattgaaaagtgcagttacagaggagataacatgctgctacgaactaataaaattctcttctttttctcaggtggctcatccacaataagcttaaactctaaccaggctttggcaaacccagtttcaacacacaccattttaactcccaattccagcctcctgtctacttctcacgggacaagaatgccatcattatctacagcagntcagaatatggggatgtatgganatctgccttgtaatcaacctaacacatacngtgtcacttcaggaatgaat

SEQ ID NO: 1602 - DNA, 512 bp, homo sapiens
gaataaatagacattaattatgaaattcacattaagatagaagaaaatccaaacattctgattgctttatctcttaaatttgataactactacaaaacatactatttatgttagggtaaaaataagctgactcacaggagtgtaactgggaagtgctggcagatatatacagtaacatggaggagccatacaataaaagcgtttatatgtacatcattttttttctttttgtatggagaaatgctgccttataaaatcggaaaacacacagtagactacatgcaacaaggaccaatacaatgtgcacagcagaagaatcaaataagacacaagaactatgggtttaaaaaagaatttgggagcaggacaaaaaacaaggattgaaacctggaatgctttcttattgaggtttcagaatataaatttgtctaacaagcctcttgatagttttcaaaagttcccactcaaccacctatggtttaagtgtgagctaaaaataaaccatcatatta

SEQ ID NO: 1603 - DNA, 404 bp, homo sapiens
  misc_feature (230)..(376): n=unknown
gaagaactgaaatcatacttcttagggttatgattaagtaatgataactggaaacttcagcggtttatataagcttgtattcctttttctctcctctccccatgatgtttagaaacacaactatattgtttgctaagcattccaactatctcatttccaagcaagtattagaataccacaggaaccacaagactgcacatcaaaatatgccccattcaacatctagtgancagtcaggaaagagaacttccagatcctggaaatcagggttagtattgtncaggtctaccaaaaatctcaatatttcagataatcacaatacatcccttacctgggaaagggtggttataatctttcacaggggacaggatggttnccttgatgaagaagttgatatgcctttt

SEQ ID NO: 1604 - DNA, 365 bp, homo sapiens
  misc_feature (254)..(254): n=unknown
  misc_feature (356)..(356): n=unknown
tcttacagtaataaatataatgcagtcttcttaagagtcagtttggagttgagaaggcagtgtacccttgatggaaacagtcagactggtggtaccatcttcttcagaactgcatctaagaggctgtgctggctgggaatcatacagctgtgggcaacaactgcatcagccccaaggcttccctccagaccaaaaggtgattcatggcccctggttaatatcaccctaggttctcccctgtcccagttttaacntaatatttcatagaaatactagtgccataaaaagtcaatatttcaaatataaaaattattttatacaaatgtaattcataatcattcttttaaaatacagcnttgttatat

SEQ ID NO: 1605 - DNA, 340 bp, homo sapiens
  misc_feature (88)..(88): n=unknown
atcaacttcaccctcttcctggggctatttttcctgaccacaccctccatcatcctgtccaccatggacaagtttaatgtcaccaaanccatccatgcgctgaataacccgatcatcagccagttcttccccaccctcctgctctggtccttctcggccctgctcccctccattgtctactactctacactgctggagtctcactggaccaagtcgggggaaaaccagatcatgatgaccaaagtctacatattcttgatcttcatggtgctgatcctgccctccctgggttcaccagtctagattttttcttccggtggctctttgacaaaacttcctc

SEQ ID NO: 1606 - DNA, 578 bp, homo sapiens
  misc_feature (32)..(32): n=unknown
  misc_feature (144)..(144): n=unknown
  misc_feature (259)..(569): n=unknown
agtgacatgagcgtgcgctgaccccacatggngccccctgtgcaagcagagctggccggcccctccttgctggcagaggcacgggaggcctgctggggatgaggccactggccagggctatgctgcaccagaccaatggcaccncccccacccctcccagcgcaggggcagcttggagcagaggcagcactggccaccactgcgggggcaagtcagcgtcaagagagtccctgagtgagaaggcccagataagcccagnncccccaggccagcggacaggcacaggcagggcctacagaggtgccaagnccccaggccagttgtgctaggagcctggacctgctcttccacantcccatcccgcccctactgcacaggcttgtgccttggtgccccctggaggcagcagggaggaggttctcaggcagaagtcttangttgcatcccattccccagaatccccaggnggganaagagggatgggctgccctcnttcctgcaagagccacanctcaagggcantgggatggccctgcacccagcccaggtaccccttcctctgtgggacnatgctgtcc

SEQ ID NO: 1607 - DNA, 475 bp, homo sapiens
cttatatagccacatgctaaatgccctttatgcagaaatgatatacatgaagataatttattagaatgtcctccagaagaattagcacgtgacagtgagaaaaagtctgatatggaatggacatccagttcaaagattaatgcgctaatgcacgcattgactgacttaagaaagaagaatcccaacataaaaagtttggttgtttctcagtttacaacattcctgtctttaatagaaataccacttaaagcctctggatttgtgtttactcgtttggatggttccatggcccaaaagaaaagagttgaatcaattcagtgttttcaaaacactgaagcaggatctccaactataatgcttctgtccttaaaagcaggtggagttggtttgaaactgtctgcagcttctcgagtgttttaatggatccagcctggaatcccggctgctgaagatcagtgctttgacagatgcctag

SEQ ID NO: 1608 - DNA, 285 bp, homo sapiens
  misc_feature (201)..(251): n=unknown
ccacaaaattgtttgaatcacaagtggtaatacaatgtcttcaatatttttctaaagttatttttctatataataataagacaacagcatagcatataggaagttttcattccagtggcttttttatatatttatccttcttaggaaggacaaattaaattttttaaattaaacttttaaaatataacaacatctaacagngactgtacnaanacaaagagacantttttaaacaacttgccaaacttacntatgagtgtggtttaaaaacaaccttgtaaatgt

SEQ ID NO: 1609 - DNA, 430 bp, homo sapiens
  misc_feature (96)..(96): n=unknown
  misc_feature (197)..(233): n=unknown
  misc_feature (400)..(400): n=unknown
tggagggatccaggttgaggatataatattgagagtcatcataaccatatagatggcacttaaagtcatgattctaggagaagttatgtagatccnagatgagattgtatagggaatgagtgtagatagtaagaaagaatatattctagaagtgagtcttggagaaatctaacatttggaagtgagagagatgagannnnnnnnnnnnnnnnnnnnnnnnnnnnnnnnnnnnngggaaaggagctaaacaggtgcaaccagaagtgaaggaggaaaacaaagacaatgtggtgttctggaagccaagaatacagtgttttattgagagaatttttacccgtgtcagaaactactgataggtaaagaaaaataaggactgagaaatggtcttagaatgtanccaggtggctgttggtaaccttgtgaagaa

SEQ ID NO: 1610 - DNA, 413 bp, homo sapiens
  misc_feature (119)..(167): n=unknown
  misc_feature (281)..(378): n=unknown
atctggcctctttgtgcttcagagctgctgcaaccacagttgtgtgcccaatgcagagacctcctttccagaaaacaacttccttttgcatgtcactgctctggaggatattaagccangagaggaaatttgtatcagctacttggactgctgtcagcgggaggcancgccacagccgccacaagatcctcagggagaactatctatttgtctgttcctgtcccaaatgcctggcagaggctgatgaacccaatgtgacctcagaagaggaagaggaagangaggnngaggaggaaggagagccagaagatgcagagctgggggatgagatgactgatgtgtgatgttgccctgcccagaaagggccctgccctagancctgccagaaaagggggctcttccccccagagaag

SEQ ID NO: 1611 - DNA, 314 bp, homo sapiens
tgggagaggagtgctgaccgttgtgaaggagtaagaacccaatgggtaaggggccagacaggtttcacctggctccatggtccaggaaagggcctgtggggtgggcacctgccctctctgggatccctcagcaggagaatgcagcaggctcctccaggaaagggaggcattgggagtgatgggttgtaattcccatagcatccaacccaagagtgagaggggtggtgctaatctgggggtaggaggggacaagacaggggctactctcgaagtatctagcccaagctcctcgaggtttctggaagacttcaatg

SEQ ID NO: 1612 - DNA, 536 bp, homo sapiens
  misc_feature (21)..(21): n=unknown
ggcgcagggatggcacaaaanaaatatcttcaagcaaaattgacccagtttttaagggaagacaggattcaactttggaaacctccatatacagatgaaaataaaaaagttggtttggcattaaaggaccttgctaagcagtactctgacagactagaatgctgtgaaaatgaagtagaaaaggtaatagaagaaatacgttgcaaggcaattgagcgtggaacaggaaatgacaattatagaacaacgggaattgctacaatcgaggtgtttttaccaccaagactaaaaaaagataggaaaaacttgttggagacccgattgcacatcactggcagagaactgaggtccaaaatagctgaaacctttggacttcaagaaaattatatcaaaattgtcataaataagaagcaactacaactagggaaaacccttgaagaaccaaggcgtggctcacaatgtgaaagcggatggtgcttgaactaaaaccaatctgaagagggccgcgaggaaaaacctcccagttaagaggaaga

SEQ ID NO: 1613 - DNA, 344 bp, homo sapiens
  misc_feature (92)..(316): n=unknown
caccacactatatccagctggaggacggcgtagttatccactgtgtccagcagctctctgcaacactcacagaaatatttgtcagcgtccancaganatggcaaggctattccatattcttttcttttcaggaaagctctgcccttctcatgatatcccatagctaacataagggnttttctttctgatgggggaattctgattgatctgcctgtctggttagctatgtctaagtaacgntgtcatttctggatccaccactgtctctgctctctttgccagtatttctagtcctctcttggtcctctgaatttgnttttctttgagtttggcctcattttgct

SEQ ID NO: 1614 - DNA, 445 bp, homo sapiens
  misc_feature (73)..(177): n=unknown
  misc_feature (298)..(298): n=unknown
gccaaggttcctgggtgtgaacatgagtttcagagtcactcctctagggcccctgcttctcagctcggaccannnnnnnnnnnnnnnnnnnnnnnnnnnnnnnnnnnnnnnnnnnnnnnnnnnnnnnnnnnnnnnnnnnnnnnnnnnnnnnnnnnnnnnnnnnnnnnnnnnnnnnnnaccaggacagcagcactggccacagaaaaaaactgtcttgccctgagcatcagtagttccccgttgactggccctgaggcagagcgatgcagcatccaaaaggcggtggagcagacctgcnccagatcctagtcacttaaccttcagtgttgatctgaaggaacttcctgcagattgtccccctgaatttattctggacatccccaatggggtctgctgaggccatatacccctgttccgtcacctgagatgcttctctctcttcctg

SEQ ID NO: 1615 - DNA, 535 bp, homo sapiens
aacaaggcccgaggggtcctgattgcacttctgatgggtgtgaacaacaatgagacctgcaggcacttatcctgtgtgctctcggggctgatcgctgacctggatgctctagatgtgtgcggccggacagaaatcagaaattatcggagggaggtagtagaagatatcaacaaattattgaaatatctggatttggaagaggaagcagacacaactaaagcatttgacctgagacagaatcattccattttaaaaatagaaaaggtcctcaagagaatgagagaaataaaaaatgaacttctccaagcacaaaacccttctgaattgtacctgagctccaaaacagaattgcagggtttaattggacagttggatgaggtaagtcttgaaaaaaacccctgcatccgggaagccaggagaagagcagtgatcgaggtgcaaactctgattcacatatattgacttgaaggaggcccttgagaaagaaagctgtttgcttgtgaggagcacccatccctaaagccgtctggaacgt

SEQ ID NO: 1616 - DNA, 620 bp, homo sapiens
  misc_feature (178)..(266): n=unknown
  misc_feature (379)..(379): n=unknown
  misc_feature (534)..(534): n=unknown
gaatttactcactaaggaaaactataagctcagattttacaaacaaaagcaacttacaaggtattattgctggtcctttatcccttctctttaatgcaatctcaaaggttttttggctattagttttcataattttcttatgttgcacacaaaaacaagattcctctctaaaacgtanaggatggggaaaatgcagatgctgtttttccaactaaaaatgtttacaaaagaacagactgtctgaacnnnnnnnnnnnnnnnnnnnngttaagctgggtaggaccaatcaggccttataagtgaaaaaaaagccttctatcgagcataatgaaacagaacatgtactgcttgtgtttgaaccttactcttatttaaccanaaatttcccctttctcataattttcctagtattatgtaaggttatgcctagttctagattctgaaagacctgcattttaatgcttgcacaacccatttaaaatctacaaaagctgcctctattttgttttctgattaaaaacgcaaaaaaaaggncaaaccaaacaaaccacaccacatcatacaggtaatgatccgatggaaaagttaacgtgctgtaatgatatttgtcttgcaacatc

SEQ ID NO: 1617 - DNA, 191 bp, homo sapiens
  misc_feature (145)..(186): n=unknown
acacccggggccacctcttaatctagacagaaatagctgtttggttttgtttttaaatagatctatttcccttatcacttcaattaaagactataaacaacaaaaatctcattgtgtctacacatcggggtgaccttaggtcggnttgtaagtggatacaattaataaaataaaatccattgccnnttttt

SEQ ID NO: 1618 - DNA, 267 bp, homo sapiens
  misc_feature (13)..(13): n=unknown
  misc_feature (232)..(251): n=unknown
gtttaagttcganctgcaatgttggcaatgcaggtttttaacacagatcacaaaaagcgtgcacaaaaaagtactggcgcaaaggacaaaataatgctaagaattaggccaaacagctgctgattttaagaaaacaaaaggcctgaaatcactgtacaaaatagaaaatgtattaaacactaccatccacagaacagtctttactattgatatatttaaaaattatttgtgnaattatatattgaattntnaatgagtattatacat

SEQ ID NO: 1619 - DNA, 481 bp, homo sapiens
agagcctccatatgtctcatctgtgctctccgtgttcctttcctttttttgatatatgaaaacctattctggtctaaattgtgttactagcctcaaaatacatcaaaaaataagttaatcaggaactgtacggaatatatttttaaaaatttttgtttggttatatcaaaatagttacaggcactaaagttagtaaagaaaagtttaccatctgaaaaagctggattttctttaagaggttgattataaagttttctaaatttatcagtacctaagtaagatgtagcgctttgaatatgaaatcataggtgaagacatgggtgaacttacttgcataccaagttgatacttgaataaccatctgaaagtggtacttgatcatttttaccattattttagggatgtgtattcattatttatgggcccaccagtctcccccaaatttagtacagaatatccatgaccaaattactttacggat

SEQ ID NO: 1620 - DNA, 420 bp, homo sapiens
  misc_feature (232)..(232): n=unknown
  misc_feature (346)..(351): n=unknown
tcaaagctcagcttgatttgctggaactacacagagacatgtttgatcacacaacagcaactgtacatcctcccaagtctggaatacagaattgatggaggacacttaacttgcttaaaatgtatttgattattctgcatttatgataaaaaatatcatccagggattatattcaagagggtaaatttaggattacatgtttctagaacatataatatgtaacaccatccanaaacaacaacaacataaagcactggaaccaaagaaccacttaaaatttagaataaattaggaaatttcaatctataagtgtcaaacaacaaatgagttataatatttttctaanaaganaaatatcacctggggactatgagtactacatccttgatctggctggccaccattttgaagaccaccaca

SEQ ID NO: 1621 - DNA, 469 bp, homo sapiens
  misc_feature (454)..(454): n=unknown
attaaaataactcaagctcaggaagacattctcttaatctttgttccttaattaacccaagtctctctgtcagttttctaaatagcacaggaactgggaaactaatttatccatagaccatgtggtcttctgaactagagtcaacataaaggaaattgcttaaaaaaaaagtacggaacaggtacctgtgtttgtgctcatagaaacagatgggcaattcccacttctgtacattttgtatatgctataaatattttggggacattttgaaacagtgttatttattttgtaggtgaaaaaccaaatacattctagggatgaccttgatgacataattcagtcatctcaaacagtctcagaggacggtgactcgctttgctgtaattgtaagaatgtcatattactcattgatcaacatgaaatgaagtgtaaagattgtggtcacctattgganattaaaaatacattt

SEQ ID NO: 1622 - DNA, 336 bp, homo sapiens
tttaaattctaaaagcttcagaaaataaatgcacgtaagggaaacatactgagtaaccaagatgtgtcttggaccatgaatggtgctaccacttactgagcagccctgtgtgctgggaaccttgtcctgtggtcagtgcctcggccgtatccatcacacatggtgtcatggaaaccaggtttccaccagcaacctgggcatgttagagcttctgtgtctgcttggtccattcacttggattgtctcctcctcctcttgggatgtcattgtcacctatggatgggagtgttgcatttgtccatccctggagggtgtccacacgcatgttccctgctg

SEQ ID NO: 1623 - DNA, 516 bp, homo sapiens
  misc_feature (305)..(485): n=unknown
ctctttgcctgcgcctgggcctcgtagtgtgctgcttacgtgatgcccacgtgccacagagttattgcccgaagtgccagtgggctgtgcaggggatgggctcttccttccagatggtctgcagcctctgggaccacgcagccaccatcccctttctttcttcttcggatgcaatttcaggagcaaagctgatctgaggggcaaggactttaaatccacagaagtgtaatgtgccatgctggagtggccacaggaagtatcgagaatctccattgactcctgtcttcgtgtacatctcggccgtncctcccgtggttacgggaaaaggagcgctagtttaaccctgcaanggnagaaagcagatgcatttgtgtggactncagaagaggacagaaatgttgctgagcctccaagcacacgggctcagcacagccagcaaggaacatgcgtgtnggacacctccanggatggacaaatgcaacaantcccatccataggtgacaatgacatcccaag

SEQ ID NO: 1624 - DNA, 311 bp, homo sapiens
  misc_feature (254)..(302): n=unknown
ccccacttctcgggatcggggtcccctgctttgctctccctgcccctctgtgcccccacatctgtctcggtggtctcgccactctgtgcctcttgcgctgaaggcccgcctttgagcctgcttctttgcctggggcccttggcccccccttgctttttcagccctagccccctgtctccccttctctctgctccttgtctccctctccctttttctgtctttgccgggtctctgggtctctgaccccatccggnnctcatggtttgtgtctggagtcttgaagcaatgttcatcatgcctantggcgtata

SEQ ID NO: 1625 - DNA, 313 bp, homo sapiens
  misc_feature (279)..(279): n=unknown
tgcatggtctcagagcctggtctgggcctccgggacataaatctcgatgctgtctgcgctctcggtggctgagttctgccgcacagaagctgcccgcttggccgccaggagtctcttgcgggcctcctggcgctgcttgtcgctggcgtctgaggccttgttcgcggctcactgccggcttggatttggctggcttctttgggaccggagggggtggtttcttctcttccttcctcttctcgggggtctccaccagctgccagctgttggccttgaggnggtagagttcatcgaacttcatgctgatatcctc

SEQ ID NO: 1626 - DNA, 408 bp, homo sapiens
gtgacttgggatgaatataacattcagatgtatgatcgtgtgattgactttgatgagaacactgctctggatgatgcagaagaggagtcctttaggaagcttcacttaaaggacaagaagcgatttgaaaaagctaaccaggattcaggtcccggtttgagtcttgaagaatttattgcttttgagcatcctgaagaagttgattatatgacggaatttgtcattcaagaagctttagaagaacatgacaaaaatggtgatggatttgttagtttggaagaatttcttggtgattacaggtgggatccaactgcaaatgaagatccagaatggatacttgttgagaaagacagattcgtgaatgattatgacaaagataacgatggcaagcttgattcccaagagctg

SEQ ID NO: 1627 - DNA, 332 bp, homo sapiens
  misc_feature (286)..(317): n=unknown
ccctttatagaaaccattttaaaattaagcagaacttctcaacattaatatgtgaggtctaagtccttctaaaggtttctttaaaggttttaaacaaaatgctaaacctaaaaacattgtcctgtcagttcccaaattaaatctacttagaacaaaaacaaaaatttatagctcggtcacatactacttaaataatattgttcaggcatctctaaaatcctccatgttttcaagtatggaaatagaactcaaatattccacaatacagtactaaacagatggagtnnttaggaaagactttgttgtcatatggcncnatattaatattttgt

SEQ ID NO: 1628 - DNA, 560 bp, homo sapiens
ggacagcagggccaacagtcacagcagccctgaccagagcattcctggagctcaagctcctctacaaagaggtggacagagaagacagcagagaccatgggacccccctcagcccctccctgcagattgcatgtcccctggaaggaggtcctgctcacagcctcacttctaaccttctggaacccacccaccactgccaagctcactattgaatccacgccattcaatgtcgcagaggggaaggaggttcttctactcgcccacaacctgccccagaatcgtattggttacagctggtacaaaggcgaaagagtggatggcaacagtctaattgtaggatatgtaataggaactcaacaagctaccccagggcccgcatacagtggtcgagagacaatataccccaatgcatccctgctgatccagaacgtcacccagaatgacacaggattctataccctacaagtcataaagtcagatcttgtgaatgaagaagcaaccggacagttccatgtatacccggagctgccaagcctccatcttccagcaacaactccaac

SEQ ID NO: 1629 - DNA, 180 bp, homo sapiens
  misc_feature (32)..(176): n=unknown
cacagggccaccggtcctgcaagctttctggngcaggccaggcctgaccttggctttggggcagggagggggctaaggtgaggcaggtggcgccagcaggtgcacacccaatgcccatgagcccanacactggacgctgnncctcgcggacagttaanaacccaggggcntctncnccct

SEQ ID NO: 1630 - DNA, 571 bp, homo sapiens
gtgcctgggaagtatgtagacggggtacgtgccaagcatcctcgtgcgaccgcgagagcccggggagcggcggcttgccggccgtcgcactcatttacccggggacagggagaggctcttctgcgtgtagtggttgtgcagagcctcatgcatcacggagcatgagaagacgttcccctgctgccacctgctcttgtccacggtgagcttgctatagaggaagaaggagccgtcggagtccagcacgggaggcgtggtcttgtagttgttctccggctgcccattgctctcccactccacggcgatgtcgctgggatagaagcctttgaccaggcaggtcaggctgacctggttcttggtcatctcctcccgggatgggggcagggtgtacacctgtggttctcggggctgccctttggctttggagatggttttctcgatgggggctgggagggctttgttggagaccttgcacttgtactccttgccattcagccagtcctggtgcaggacggtgaggacgctgaccacacggtacggctgttgtactgctcctcccgcggctttgtct

SEQ ID NO: 1631 - DNA, 334 bp, homo sapiens
  misc_feature (230)..(332): n=unknown
cctgatggcactgtggagtgtgggcagcgtggttcaggactatgactcgtgagtacctgcttctctgggctatacccgctccctgcagatgcttcagcctctgagcttacagtcccctcactgccttttgcccaatacactgtcctcccacagagacaagctgttccctgcatttggatttggggcccaggttccccctgactggcaggtgagctccctctctttctgcnactcctgttttcagtttcagggtcctgattttgggggatgtggtaaatttacttgctacttggcactcagctttaagaggagatgnagggttggattcctgnag

SEQ ID NO: 1632 - DNA, 540 bp, homo sapiens
caagagcagcaaaagcagaaacaagtataaaagtatcaaaaaatacaaagtgctagcactgaggagagtgagaagggttgggttgtggcccagagggacctctgggacacaggattgaggacttgccacagcctccaagggaacctaggcctggggggcctgtgcaggatccttggctgagggtggaagtggcttgagcggggcccaaccctgggccctgaagtatgagaccagttgtgtgggcacttctgcgagcacggtctgtgccaatgcctcccgaggggcattctggaaccggcggtagggtacaaactgcacaatgtcgcgggcagcagcctgcccagaacgtgtatgcaggggtccaccatcagcgtccagctgctccatggcctcaaagtcagcaccacccacacccacaatgatcactgacatgggcaggttcgaggcacgcaccacagcctcacgtgtggcttccacatccgtcacagcaccatcagtcagcagcaacagcatgaagtattgcgaggcagtcccctgatg

SEQ ID NO: 1633 - DNA, 341 bp, homo sapiens
  misc_feature (35)..(35): n=unknown
  misc_feature (271)..(271): n=unknown
cgacagggagggatgcgcgcctgggtgtagttgtnggggaggaagtggctagctcagggcttcaggggacagacagggagagatgactgagttagatgagactagggggcgggctgggggtgcgagaaggaagcttggcaaggagactaggtctagggggaccacagtggggcaggctgcatggaaaatatccgcaggtcccccaggcagaacagccacgctccaggccaggctgtccctactgcctggtggagggggaacttgacctctnggaaggcgccgctcttgcataactgagcgagcccgggtgcgctggtctgtgtggaaggaggaagcaagga

SEQ ID NO: 1634 - DNA, 435 bp, homo sapiens
  misc_feature (334)..(334): n=unknown
cttgtaaaaggttatttatctttaaaatttagcaatttgaagacactatgccttcctaagaactaatttaattctaaatattttttaacattactgaggtgaattatttatgcacttaggaagtgctaaattttaaaagctgaaacacaacagaattctaagaaatatagtccaaacgttgcatggattgcagtaatcagtgtttaaaggattcagtttctttgctgacgtactttacaaccaaataaaatcttgtcggtggctgtgttaattcccatgaaagttaagcaagatgctattaataaactgctctgctctttcttgttttcttttnccaacttaaatttctgttgaatacattcaggtagaacataaagccttgttcaatcactgcctctcagttttctgcctttcccggttttcaaagtccttttg

SEQ ID NO: 1635 - DNA, 401 bp, homo sapiens
cttttctccaccctcagctctccctggaatcacctagtccaccaaccttctgattactctctgaagagaataaatccctgatcttcttttcagttattttcaggctttcagtattccacctccccgttattattttttctgttatcttttctctgttttttgagtttttgtggctttatgccactactttaaccacaatctctatttatccttcatgtacagttcccatgttagtccataaaaatacttaagcttttgtatttaacatttttcaccgttttggaaagggtctaaaattcccaggactccacagctttgcaccagataagcctggaggaatactaatgatggatctaaaagaagaaaaaccaagggcacgggaattaagaatcagtcgtggg

SEQ ID NO: 1636 - DNA, 555 bp, homo sapiens
  misc_feature (483)..(532): n=unknown
taatggtaaacaaagatgtaagtacaaaacatcaaaatacgttatcagtagttctaaacagccatagtagtcacagtgccagaagtgaggtcactcacattttaaggaaatataattcactctatttcagtggaatccatgttctggcagttggaaggcaaaggtgaggcttactttgtgcaaaatgtattcactttattcgaaagcagctttcttttctgtcccttgcttggcattttaaagaacctgttcattttccttttttgttaaaagtgctctaagaactaaaagggccgttccttactggaataaaattaactacacatgccatacatttctgggtcaatgttgctggttaaattccctcagaattagcaattcatagaaaattaattgttaagttatcgcactttcatgccaaaagtacaatttagagttcacaatacaaggctctgtggtataaagtgcctatgagcagcttcncatcatacactgagggctacagaacttccttggagaacagacncattgntggcataaactgtagtcactgta

SEQ ID NO: 1637 - DNA, 496 bp, homo sapiens
  misc_feature (78)..(124): n=unknown
  misc_feature (424)..(493): n=unknown
gaagattaccacctcgaagaagccaaatcttatcctgaatgtagatggtctcatcggagtcgcatttgtagacatgcntagaaactgtgggtcctttactcggacactatcttgatcagaagangctgaagcaggggctgtatcgtcatccgtgggatgatatttcatatgttcttccggaacacatgagcatgtaacagagccaggaaccctactgcagtaaactgaagacaagaactcttcccccaagaaaaagtgtacagacagctggcagtggagcctgctttatttagcaggggcctggaatgtaaacagccactggggtacaggcaccgaagaccaacatccacaggctaacaccccttcagtccacacaaagaagcttcatattttttttataagcatagagataaaaaccaagccntatttgtgactttggctctgctacctgctgtntttattatatgggangcatctaagtactgtcaggatnggg

SEQ ID NO: 1638 - DNA, 504 bp, homo sapiens
  misc_feature (4)..(488): n=unknown
acanagaagagactnangtggcagctgcccagaatctttgnggattacagatgcaaagtagttaggagtccttggacncacacttcagttacagacagannagtcagctgcataaatacagagnacataagacacaagacatttcacagctttctgcatttccnttttaaatgtatgtatgttacaactttacntattaagttactantccacatattttgtgacaatggctaaggatgcaanngccccatccccctgacatanacagactctggtctgcaacacagaacntttcngtgggatacccaacaagcccttaacacgtaacatacnaaaagatctttnaaaatcagnttaatacaatgttcttcatgntatatanggaagaagnaagggaagtnaaanaaaaaaaaganagncattggggtgctttaaatgtatagtatcttgaggccctaaatgtttcnttcccttcctccaaanggggnaaaaatgtttaactaa

SEQ ID NO: 1639 - DNA, 525 bp, homo sapiens
ggggcaaccactgcgagtactgcttcaccaggaaagaaggattgtccaaatgtggaagatgcaagcaggcattttactgcaatgtggagtgtcagaaagaagattggcccatgcacaagctggaatgttctcccatggttgtttttggggaaaactggaatccctcggagactgtaagactaacagcaaggattctggccaaacagaaaatccacccagagagaacaccttcggaaaaattgttagctgtgaaggagtttgaatcacatctggataagttagacaatgagaagaaggatttgattcagagtgacatagctgctctccatcacttttactccaagcatctcgaattccctgacaatgatagcctcgtagtactctttgcacaggttaactgtaatggcttcacaattgaagatgaagaactttctcatttgggatcagcgatatttcctgatgttgcattgatgaatcatagctgttgccccaatgtcattgtgacctacaaagggacctggcaga

SEQ ID NO: 1640 - DNA, 382 bp, homo sapiens
attacaagaggcatgaaagaaaaaataattccatttttaaaactctgtccaaagtataacatatgaaaccatgccattatctcttaggaaacaaaagcattcaaaattaatttggtattaaagttcaagattcagactaacctcaaagtacggcatgtgcagtgtttaagtgcaagaagtattttcattccaattattttacagagatgctggagtgacgtgtgcaatttgaaatattcaaatcctttaaggtttctgaactaagtgtttaaatgaaaactgaaatgctgcatagtttcagtggctttcaatttcctgtttgatctcagaaatatatggatgatctttgccgtgagctacttccatgattgcaatggccttc

SEQ ID NO: 1641 - DNA, 504 bp, homo sapiens
  misc_feature (439)..(485): n=unknown
caaaaatgagcttccagtcctcaaaccccacaacaggacctaattaaccgcgccttcaaggtgtacaataataaagagttgcaattacttgcctctgctgtgtgagaaaccccagccatatctccagcacacaaaaacttcaaaacgcctaagccacagcagtcaggcattccttcaggacttcctcccccaggatcttgcttcaagtgctggaaatctggccactaggccaagggatgcccacagaactgggactcctcctaagccgtgtcccatctgtgtgggaccccactggaaactggactgtctaactggcccaaggctctgactgactccttcccagatcttctcggctcagtggctgaagactgacgttgcctgatcacctcggaagcctcctggaccatcacagacgctttgggtaactcttacagtgganggatacaattgaagacactggttattttancaangcnttgattggnatggcttactttcagatat

SEQ ID NO: 1642 - DNA, 164 bp, homo sapiens
  misc_feature (5)..(161): n=unknown
ttttntctgtttctttttaaaatcnttcagaaagannattttagaaganaatgagtcnaccagtctccaggtttttctgatcacttatagctaggatgatctattctagacaggtangtctcacattattagaaaagctcattngtagccngtngnaaagnatc

SEQ ID NO: 1643 - DNA, 416 bp, homo sapiens
  misc_feature (266)..(409): n=unknown
tccctgtgaacaacttacagcaaaaatgaaacaaatgaaaaaaaagcttcgtgtactacaaaaggaactatcagaaccaaaagaaataaaatcatagagaatcaaaaagttaaaagagaacaagagctctgcagtgtgaggtatgacatactagtatataggatacttttagtactagctgacttaccttctgaggtttaactagagaaagaaatctctgtcttgtagtgtcaaatccatttaaataatacaagttattaactgtnaatacatctcctgntaattaaatncntatttatttaaatcaccattttaatggctacatagaaggccatatttgggaanccccttatttacctaaaaanttattttttattttaatttttttgtggtataataagtgctgcangcataat

SEQ ID NO: 1644 - DNA, 66 bp, homo sapiens
  misc_feature (7)..(64): n=unknown
ttatcancanattttaaatctctttnagaatnagacagaatattacatttaattaannaatannaa

SEQ ID NO: 1645 - DNA, 456 bp, homo sapiens
taaacacatatcaatgtgaaggactaatttaaattactatcatttatgattgcagtaataaagtgataagcattcaagcaactctgtattttccccatattattttaaatgtccattttcatttataggccaaatcctgccaggaaagtaaccagatctctggatttcactgttaagtcatttcagattgaccatattcagacagtcatggggtgaaataattcacttacctccaaaatagcatcctatatgccaataatgagttattgatctgactagttgtatgtctttctgttcaaaatagaaattatcctttcttactaatgccttgaaagaatgaacaaataaaaattcccagaccacagaatttccacagcaagaatacacttattttaattaacaatagcacagatatagcatagggcagtgggttttttagttaatttatggcgtact

SEQ ID NO: 1646 - DNA, 392 bp, homo sapiens
aaatagaattgataggacatttcatttcttacctactcttctcaatggggttataacaatacaatgccacttagtttttgtcagctcttgaaaatgtccagcagctcacacttagtatgatattacaaggcacttataccacacgatacgatacttagcaacccatctcatagatacaattgacatttctttgagaaacatttctaaatatagaaatagataggacggcaccatctcttcttttccacaacacagcatagcattttccccatgttacctatccacaccataaatgtggacacctcctcccatttctgttctcgatacaggttgataatcaagctgaaattactttgcttgcttctcttcaatctcatctcagtttggtttaa

SEQ ID NO: 1647 - DNA, 450 bp, homo sapiens
  misc_feature (120)..(120): n=unknown
  misc_feature (301)..(387): n=unknown
cggcttcaggcccggctaactctggcaccccggatcgaggataagtgagagagcaagtgggggtcgagactttggggagacggtgttgcagagacgcaagggagaagaaatccataacanccccaccccaacacccccaagacagcagtcttcttcacccgctgcagccgttccgtcccaaacagagggccacacagataccccacgttctatataaggaggaaaacgggaaagaatataaagttaaaaaaaagcctccggtttccactactgtgtagactcctgcttcttcaagcacctncagattcnnnnnnnnnnnnnnnnnnnnnnnnnnnnnnnnnnnnnnnnnnnnnnnnnnnnnnnnnnnnnnnnnnnnnnnnnnnnnnngagtgactcggtgtaaaaccatgtagttttaacagaaccagagggttgtactattgtttaaaa

SEQ ID NO: 1648 - DNA, 104 bp, homo sapiens
  misc_feature (7)..(98): n=unknown
caacaanaacaaaaaaatcagaatctgcangggcttgaagaancangannctacacagtagtggaaaccggangnttttttttaactttanattcnnncccgtt

SEQ ID NO: 1649 - DNA, 478 bp, homo sapiens
ggattgttggagagagtaactaggattctagcttctctggattttgctcagaacttcatcacaaacaatacttcctctgttattattgaggaaactaagaagtatgggagaacaataataggatattttgaacattatctgcagtggatcgagttctctatcagtgagaaagtggcatcgtgcaaacctgtggccaccgctctagatactgctgttgatgtctttctgtgtagctacattatcgaccccttgaatttgttttggtttggcataggaaaagctactgtatttttacttccggctctaatttttgcggtaaaactggctaagtactatcgtcgaatggattcggaggacgtgtacgatgatgttgaaactatacccatgaaaaatatggaaaatggtaataatggttatcataaagatcatgtatatggtattcacaatcctgttatgacaagcccatcacaacattgat

SEQ ID NO: 1650 - DNA, 498 bp, homo sapiens
aggggctgtcgtggtgattccatggtgaaataacttagcgccgtctcattgcagttggacctcccaggccgacagcggtccggcctctgaagattcaggccaaaatgagggcctccaccaagggcccatcggtcttccccctggcgccctgctccaggagcacctccgagagcacagcggccctgggctgcctggtcaaggactacttccccgaaccggtgacggtgtcgtggaatcaggcgctctgaccagcggcgtgcacaccttcccagctgtcctacagtcctcaggactctactccctcagcagcgtggtgaccgtgccctccagcaacttcggcacccagacctacacctgcaacgtagatcacaagcccagcaacaccaaggtggacaagacagttgagcgcaaatgttgtgtcgagtgcccaccgtgcccagcaccacctgtggcaggaccgtcagtcttcctcttccccccaaaaacccaagggacacc

SEQ ID NO: 1651 - DNA, 413 bp, homo sapiens
tgctgggtgcctgggaagtatgtacacggggtacgtgccaagcatcctcacgcgaccccgagagcctggggagcgggggcttgccggccgtggcactcatttacccggagacagggagaggctcttctgcgtgtagtggttgtgcagagcctcatgcatcacggagcatgagaagacgttcccctgctgccacctgctcttgtccacggtgagcttgctgtagaggaagaaggagccgtcggagtccagcatgggaggtgtggtcttgtagttgttctccggctgcccattgctctcccactccacggcgatgtcgctggggtagaagcctttgaccaggcaggtcaggctgacctggttcttggtcatctcctcccgggatgggggcaaggtgtacacctgtggttctcggg

SEQ ID NO: 1652 - DNA, 444 bp, homo sapiens
ggaggcctaaatggaatgggaatcccagagcagtggctatggtgtgagtagacctctgcagactgttattggatctcagatctctgcagtgctggggactgtcacgcgcgtctgtgatggtccagggggcttccaaggcgattgggcagtgtcggtcttcagctgctaagccgagcagatgtgggaagaagtcagccaaggaacgttgggtttgagctccaggagctttaggaatggtggcgatgtgagtcggacagtccaacctccagtgggggcccacacagacagggcacggcctaggaggaatcccgagctgtgggcattctcaggcccagtggccaggcttttggcatttgaagccaggtccacgaggaggttttgaaggagcccctgggaatgtggcttggatgttctgaagtttttgtgtgctggaaacgtggttgt

SEQ ID NO: 1653 - DNA, 248 bp, homo sapiens
aagaattaagaagcaaagactcaggtggactgaaggccgctatgatcgaattggtggaaaggttgaagttcaagagctcagaccctaaagtaactcgggaccaaatgaagatgtttatacagcaggaatttaagaaagttcagaaagtgattgctgatgaggagcagaaggcccttcatctagtggacatccaagaggcaatggccacagctcatgtgactgagatactggcagacatccaatcccac

SEQ ID NO: 1654 - DNA, 516 bp, homo sapiens
  misc_feature (504)..(504): n=unknown
ctttagtgagtcaggacaatcctaacctagaagcatatatgcctgggagcttcctggcctcaaaggaataaatcttttcacagcattcacaggactgaaaaataatataaataggattcctacagtaaacaagtattgtttctgtttcaaaaccatcctgcaagcataacaatcagctggtcctaaagcctgtaatacgtacacaggtcacaggcagacaggcaggcaggaaaagggattttccccagtgcaggctcctttggttctgcctcagaggcactagaagtctaggccctgggttaacagcaacccagagtctgcttggatatggttctagttgtatgcttcgtaagtgaacaccaaaataccataaaggtagaggagagtgaacacataacccacttgcaaataagaattaccttgcaagattcctatttttttatcttaacagtctatgcgtatgaacattttattctataatataacttttatataaaaataggncatcttatgact

SEQ ID NO: 1655 - DNA, 363 bp, homo sapiens
  misc_feature (59)..(66): n=unknown
ataattattatatgtaactgaagcaacctacttttgaaaatcaactgtattgggtagtngnnggnnggagggaagggctttgggaaggggatgaatatctctttttacctttaacagacttgtttaatcttctcgatgtagatgtttatgtaggtacttcacattgcaaacgccttttattctatttacaagctcagatgtctctgctctcctgaatcttgggcatgcctttctgtaaccaaaaatccctgtaggcgtgctagcaattccagggtggtccgggtttggcagatttgatttttaaaaaacgtattatctttaataaaatgttattatgtcaaccagtgaggctgccctgaacaa

SEQ ID NO: 1656 - DNA, 478 bp, homo sapiens
aagtatttaaagtgtgtgactcctttcttatagagccagcaagctgtattggaatcacttttccagtgttgtaaatgttatttttgtgggtcagtcagtatactcgtgaatgacagaaaaacagatcccaacaatgcaaagtattatatgtgtaaaaaagaacagaaaaaagaagctgccttgttagtaacgggctctatggtttttctcatcaagaggtcatgacgccagtcagatcacactagccttgggcacagctgcctcctaccccagggcctgccaggctctcggggccatgctgtccaaaggagccctgaaccctgctgacatcaccgtcctgttcaagatgttcacaagcatggaccctcctccggttgaacttatccgcgttccagccttcctggacctgttcatgcagtcactctttaaaccaggggctcggatcaaccaggaccacaagcacaaatacatccacatc

SEQ ID NO: 1657 - DNA, 479 bp, homo sapiens
aaattaagacaattacaataaaacatcagctaactgggttcttgtgagaaaactgaggtcagcttggaaaggagttccccgagtggagttcccagcggcccgcggctgacggccagatctgtcctgaggggtcgtgggagcccagcgcctgccttgagggaaatgaacactgaaaacaggatttgggagcagtattggattgacagcagagaagggactgtttgtaagggcagtttctcactgaagctgctaccattttcctttgtaaagaagtcatccacctcctcccagcggtgcccattttcaagacgctgcccgagcctcttaaaacagcttcttgaaagggtttttccacaacgggttctggaatgttctgcttcagctctggaggatgctctaaattagttcaccatgatgaagttagatttgcagtgagctataaactccgtcacagggtcatgctcgccttccgtttgatg

SEQ ID NO: 1658 - DNA, 588 bp, homo sapiens
  misc_feature (475)..(475): n=unknown
ggaaactggcccagcagatcaagcaggaagtgcggcaggaggtagaagagtgggtggcctcaggcaacaaacggccacacctgagtgtgatcctggttggcgagaatcctgcaagtcactcctatgtcctcaacaaaaccagggcagctgcagttgtgggaatcaacagtgagacaattatgaaaccagcttcaatttcagaggaagaattgttgaatttaatcaataaactgaataatgatgataatgtagatggcctccttgttcagttgcctcttccagagcatattgatgagagaaggatctgcaatgctgtttctccagacaaggatgttgatggctttcatgtaattaatgtaggacgaatgtgtttggatcagtattccatgttaccggctactccatggggtgtgtgggaaataatcaagcgaactggcattccaaccctagggaagaatgtggttgtggctggaangtcaaaaaacgttggatgcccattgcaatgttactgcacacagatggggcgcatgaacgtcccggaggtgatgccactgttacaatatcctcatcgatatactccccaaagag

SEQ ID NO: 1659 - DNA, 578 bp, homo sapiens
ccctttaatcagaaagtctgattaaattcaatagtaactcaaactcttaaaaaatttctggaaaagtcaacaggatacatacatcacagaaaagcaggcagctgctgacagttctttggtggaaaagtaagttgcgtacttacccaagctgcccaaatgattatcaagccaagtttgtttttcaaaaataggttttaagatacaccaaagaaactatacaatacaaaaatttaacaatgaagttaaagtatatagcaaaagccaaatatgacaacacacatgtataatgtagaaaagaatcctttcagtcctagaaaactaaaatggggagaacttactgaagggtaacatacataaaatgagtactaatagcaaggaataatcctaaacattttcccaataaactgactaagcctcaaaaggacagcttaggaaaatgattaacatgcagtttttcttttttcctagccaattcagttctacttagataaatctggttgccaatcaatacatatataaattaatttttttctgctccaattactaccattttttcttttcaccttttccctaatttt

SEQ ID NO: 1660 - DNA, 395 bp, homo sapiens
  misc_feature (342)..(380): n=unknown
tgttgatgtagccaagttcacatcaagtccagggttaagtacagaagatctaaagcgggaagccagtatctgtcatatgctgaaacatccacacattgtagagttattggagacatatagctcagatggaatgctttacatggttttcgaatttatggatggagcagatctgtgttttgaaatcgtaaagcgagctgacgctggttttgtgtacagtgaagctgtagccagccattatatgagacagatactggaagctctacgctactgccatgataataacataattcacagggatgtgaagccccactgtgttctccttgcctcaaaagaaaactcggnnacctgttaaaacttggaggctttggggtagctattcnaattaggggagtctg

SEQ ID NO: 1661 - DNA, 496 bp, homo sapiens
  misc_feature (281)..(281): n=unknown
  misc_feature (413)..(492): n=unknown
gtcaaactgtcctgttagttatcattttaaaggaatttacagggctgttatagatgattcttttggaatatttcagtttatagcaaatgcctaaactggtttcttcattgcacagtattttctcttaaaatgggtgctttaaaacaattacatacagattaaaaatcatttctttgcttaattaaaacgttaatactcttagacaacacagatctgaaatggtgaaaccagcaattccccccaccccaccttacaacaaattaaattgagacaaaattacnaacacatttcactacatgattattattaataaaaatcagtttctttttttttataaagttgcccaaaatgcaagggatgtgcataggtttacaacttagtcataatagcattttattcttattcccctgggngtgccccangaangggatgtagnangtactttgctgnagattanagnttgttttgtncaacacagacacaccggcagcntaaa

SEQ ID NO: 1662 - DNA, 454 bp, homo sapiens
  misc_feature (442)..(442): n=unknown
tttagtcaattccttcctgggggagtttctgaggagaatcattgggatgcaactgatcacaagtcttggccttcaggagtttgacattgccaggaacgttctagaactgatctatgcacaaactctggtgtggattggcatcttcttctgccccctgctgccctttatccaaatgattatgcttttcatcatgttctactccaaaaatatcagcctgatgatgaatttccagcctccgagcaaagcctggcgggcctcacagatgatgactttcttcatcttcttgctctttttcccatccttcaccggggtcttgtgcaccctggccatcaccatctggagattgaagccttcagctgactgtggcccttttcgaggtctgcctctcttcattcactccatctacagctggatcgacaccctaagtacacggcctggctanctgtgggttgtt

SEQ ID NO: 1663 - DNA, 597 bp, homo sapiens
ttagcaacagtttctaaacctttgccaggtctgggaagtctggcaggagagatttctaagaaccaatcattcctgcacacatttcttgaagataatatacattattccctagttatctcttcctaggtttttgtaggctcatttcaatattacaacaatctttattggaaaaccccaagtattttgtcttgaaaaatcagcaatccaggtattaaaaatagcatggaatgcccaattttactttgataattacatggtagtcagtttccgctcctggctaaagccttggattttcttctgggcagttcctaaaggcacaggtggcatggaagaaatcattccattttcatctcctccccttatttgattggtgtctggttaccaaaagagtcatcaggcccttggattaccttcttgaactgatcttctagatcgcaagtcaagactgccatcatgttcccccaaatgcaaaaagccttgttgctccacctctctcctttccagaacaagtgagctggggtttgctttcttctccatatcctgcagcttgatcaatttttctatcaggaacattttatctttgccctcattaatgat

SEQ ID NO: 1664 - DNA, 427 bp, homo sapiens
  misc_feature (330)..(422): n=unknown
gtccagtggagccccaaaatagaagcaagatgaatattccattccgcattggcaatgccaaaggagatgatgctttagaaaaaagatttcttgataaagctcttgaactcaatatgttgtccttgaaagggcataggtctgtgggaggcatccgggcctctctgtataatgctgtcacaattgaagacgttcagaagctggccgccttcatgaaaaaatttttggagatgcatcagctatgaacacatcctaaccaggatatactctgttcttgaacaacatacaaagtttaaagtaacttggggatggctacaaaaagttaacacagtntttttctcaaatgaacatgtttattgcagattcttcttttttgaaagaacaacagcaaaacatcccacaactctgtaaagctggtgggaccnatgtc

SEQ ID NO: 1665 - DNA, 573 bp, homo sapiens
  misc_feature (23)..(23): n=unknown
tactgacaatagataaacaatangggaaagacttttcagcaaagtatcactctcgtagtcatacattacaaagaaaacagtagagaacaaaggatagggtaatttaacagaaatgtttagtttaatggcataattgaaaaacaaccaaccaatcaactttctcttctacctatggaaagaatggtaaaaatgaatcaagaacttctaggtctttttcataaaacagcttaaaaagaggaaggcgaagactggggagggggtacaactcttgctaatggaatgctataatgcacaaggtcaaggatttaataaattctaaaagtgtctacatatatcagtgataactgtattattagaaatataaatgtatagaaatataaagtatatggtattaaaaacagaccttgctaatataaacatatataaagtatgtcacttctcctgtaataacagcataaagatcgatctacagtttgcccttcgcctggcactcttaaaccactcctccaatgggccatgttgaccttgaatcaacagccgctgaacccaggagaccccacagatgtgtagatt

SEQ ID NO: 1666 - DNA, 498 bp, homo sapiens
caaacagtaccagattcctgacgtcagagacatatttgctcaacagagagaatcaaaagaaacagctccaggtggcactgaatcgcagtcacttagaacaaatgaaaacaaataccaaggaagagatgacgaggcatctaaccttgttggtgaagagaagctgatcccacctgaggagacgcctgcccctgaaacagacatcaacctggaggtatcatttgccgagcaagcactcaatcagaaagagagctccaaggagaaaatccagaagagcaaaggcgatgatgccacattacctagtttcagattgccaaaagacaaaacgggtaccacaaggattggtgacctcgcaccccaggacatgaagaaagtttgccatttagccctaattgagctgactgccctctatgatgtattgggtattgagctgaaacaacaaaaagctgtgaaaatcaaaacaaaagattctggtcttttttgcgttccattgacagcgta

SEQ ID NO: 1667 - DNA, 341 bp, homo sapiens
  misc_feature (12)..(42): n=unknown
  misc_feature (201)..(341): n=unknown
actcagcaaganttangacagaagtccacatggttatctgcngcttgttaagtcttctacaatggctttgactttataacccactcagcatttgggttaagctgatataaatccttcatgtaagtgtcatcatcaaggcagcgttccccaatatttcctccaatttcatcacaaaaaaacttctcctttcttgagagtctnggcaaccccactttcttggcngagaaacctggcaagtacatcantggnttttagttcttcagttagctgtantgccanggaaactttcgaaagatggggnncttgcactcgaatcactccntgaggaacgtcagcatcan

SEQ ID NO: 1668 - DNA, 493 bp, homo sapiens
  misc_feature (160)..(160): n=unknown
  misc_feature (454)..(466): n=unknown
gcttcctcaagaattcacatttatggccgatactcccaagaacctataaaaaccttttctcgatttaaagacacagcatactgtgctacttttcgacaagatggtagattgcttgtggctggcagtgaagatggtggagttcaactttttgatataagtnggagggctcccctcaggcagtttgaaggccatacaaaagcagttcatacagtagattttacagctgacaaatatcacgtggtctctggggctgatgattatacagttaaattatgggatattccaaactccaaagaaattttgacatttaaagaacactctgattatgtgaggtgtggatgtgctagcaaacttaatccggatctctttataacaggatcatatgatcatactgtgaagatgtttgatgcacgaacgagtgagagtgttctctccgttgagcatgggcagccantggagagtgtcntacttttcccctctggaggcttctggt

SEQ ID NO: 1669 - DNA, 512 bp, homo sapiens
acaaggctttgctcctttagcaggattcccagttggaccctctccagagaggattcatatttgaattcccatctgaataccaacccaaatgttgatacagaacactcctgtattaaaattaatatccatcccagataaacctactctgtgactaagacaattgagatcttctaggtgaagatgctataattcaaaatattacatggaaaaccatgtcttacttaaaacgggtacttgttttccggccataattattccagtctcttccacagaactgcttctgcaaacagtttttttaatgtatcaaagagagtctctcgccaacatttaatacagtcaaatctattccaacttcagagttcttatatgtcttatttagcagacactatgattctatcttcttattctctggaaatccatcagatgtgtgttccaacacagaagtgccttccttccttctcatggtggcaaaaagcatatccatcatccccaaggtttctaacaattctctt

SEQ ID NO: 1670 - DNA, 427 bp, homo sapiens
atcacggctgcttttgtttacgtggcccctgctctcacccacaactccaggtttctggctctcgggaatttgaggcctgtggctgctgtggaccctgggaaagagcctgtgcttcctgagccagtgcggggcctggcatggacttcctcatcgtcctggtctgcctcatcttcagcgtgctgtccaccatcgagcagtatgccgccctggccacggggactctcttctggatggagatcgtgctggtggtgttcttcgggacggagtacgtggtccgcctctggtccgccggctgccgcagcaaacctcatcgtggtcgtggcctccatggtggtcctctgcgtgggctccaaggggcaagtgtttgccacgtcggccatcaggggcatcccgctttcctgcagatcctgaggaatgctaacaacgt

SEQ ID NO: 1671 - DNA, 410 bp, homo sapiens
tcaaaatcacaccgtgaaactcattaaaacacagatccaaatcaccacaaattattgatttctatgcgacgtaatgcccagaaggaacccctgtcctgtgtaggaaccgtcacttctctgcggctcagcagctggcaaggggaggtggcagtccccttctgtgtgtttggctggctgctgggactgggcgaggggttggaggcgggagccccacgcacagtgggctcaggggcggagaggcagggctcctctccagctaggaagagctggcagtctaacccagggaagtgggcgttccccccactcaaccacgtgccctggggaaatggtgagactgtccctcctgctggaagctgggggctcaggagcagtctccacagtctctgcccatgggtcagcatttctgagag

SEQ ID NO: 1672 - DNA, 360 bp, homo sapiens
  misc_feature (286)..(286): n=unknown
agctcttcaagctgctgaaggagggccaccgcatggacaagcccgccaactgcacacacgacctgtacatgatcatgcgggagtgctggcatgccgcgccctcccagaggcccaccttcaagcagctggtggaggacctggaccgtgtccttaccgtgacgtccaccgacgagtacctggacctgtcggcgcctttcgagcagtactccccgggtggccaggacacccccagctccagctcctcaggggacgactccgtgtttgcccacgacctgctgcccccggncccaaccagcagtgggggctcgcggacgtgaagggccactggttcccaacaatgtgaggggtcctagcagccac

SEQ ID NO: 1673 - DNA, 452 bp, homo sapiens
  misc_feature (426)..(426): n=unknown
tgggttaacaaaatcgcacctgccggtttgggtgacacctctggccaccatgcactgggccccaagaagagaccaccctgagccatggccctgcaggcaagcaagggacagctgcccagactcagggcccagtaacagtacagaacgaaccaactgaattcacggcttccctccaagctttgaaaggtagcagtccaggctataaaactctagaagcattgcgtaagaagtgttaagtctacaacaaatacatcttgtaaaaactcaataaattatatatatagatatatataaacttgtaacatctaataacatcggaacctgcacacagggccggcccctccctggaaaccgtctccctgcctgggacacacagcaattagaagaatttgtatgaaaataccagcttgctttgaagtccaaaanataaatctcctaaagaaaaatcctat

SEQ ID NO: 1674 - DNA, 415 bp, homo sapiens
  misc_feature (55)..(119): n=unknown
  misc_feature (369)..(369): n=unknown
gccggctggtggaagagtggggaccagaaagagaatttgctgaagaggagaaggnnnnnnnnnnnnnnnnnnnnnnnnnnnnnnnnnnntccacacacacaaaaaaacctgcgcgtgangggggaggaaaagcagggccttttaaaaaggcaatcacaacaacttttgctgccaggatgcccttgctttggctgagaggatttctgttggcaagttgctggattatagtgaggagttcccccaccccaggatccgaggggcacagcgcggcccccgactgtccgtcctgtgcgctggccgccctcccaaaggatgtacccaactctcagccagagatggtggaggccgtcaagaagcacattttaaacnatgctgcacttgaagaagagacccgatgtcaccccagccggttacc

SEQ ID NO: 1675 - DNA, 421 bp, homo sapiens
  misc_feature (5)..(409): n=unknown
cttanaaatttcttcattntnccactgtcttctctggacaactcttnctccctttccccctgggctgggcaantctatgagcacccacactcctccacgatcatgttctgaatgtcctttttgatgatgttttnaccatcatcatagtacnacatggacatgggtctcagcttggtngncacanagcacgatttgaggtnggcnaaggggctatggncccgcatgcggtagtggttgatgactgttnagtngaangacagtgaggacccggangtgcctgctatatggctcggncactcaccctcgcagtanttgncatgatagccagagngatcaatnatccagtcattccagccgntgtccttgaaactgncanagaactttttctnacagcagatgttnaccttgncatcacactcca

SEQ ID NO: 1676 - DNA, 493 bp, homo sapiens
  misc_feature (359)..(445): n=unknown
cagccgagggccatcgccttggaccccgctcacgggtacatgtactggacagactggggtgagacgccccggattgagcgggcagggatggatggcagcacccggaagatcattgtggactcggacatttactggcccaatggactgaccatcgacctggaggagcagaagctctactgggctgacgccaagctcagcttcatccaccgtgccaacctggacggctcgttccggcagaaggtggtggagggcagcctgacgcaccccttcgccctgacgctctccggggacactctgtactggacagactggcagacccgctccatccatgcctgcaacaagcgcactggggggaagangaaggagatcctgagtgccctctactcacccatngacatccaggtgctgagccaaggagcggcagctttcttccacactcgntgtnaggaggacaatggcggctgcttcccaactgtgcctgctgtcccaagcg

SEQ ID NO: 1677 - DNA, 233 bp, homo sapiens
  misc_feature (28)..(30): n=unknown
aggcggtaaaaggtagaaaaacagagtnnnggccaggaagggagtcggagccttctagtgtctctctgcaggtgagcggcagcccgaggtgtcagctcagcagacttggggtccaggggccgtgtcttctatcactgaccccagggcacacggaactgccttacacgtcctgccgttgtcctgcagctgcacacccgtggggcaggcgcatgtgtagaaaggctcgcttgggg

SEQ ID NO: 1678 - DNA, 394 bp, homo sapiens
  misc_feature (45)..(45): n=unknown
  misc_feature (200)..(344): n=unknown
cgcagaagctacagattctcgttgacactggaagcagtaactttnccgtggcaggaaccccgcactcctacatagacacgtactttgacacagagaggtctagcacataccgctccaagggctttgacgtcacagtgaagtacacacaaggaagctggacgggcttcgttggggaagacctcgtcaccatccccaaaggnttcaatacttcttttcttgtcaacattgccactatttttgaatcagagnatttctttttgcctgggnttaaatggaatggaatacttggcctagcttatgccacacttnccaagccatcaagttctctggagancttcttcgantccctggtgacacaagcaaacatccccaacgttttctccatgcagatgtg

SEQ ID NO: 1679 - DNA, 325 bp, homo sapiens
  misc_feature (258)..(258): n=unknown
gacaagttgtatctggtagaccagaaggccaaagaaatcattcccaaggctgacattcccagcccaagaaaagagtttagtgcatgtgcgattggctgcaaagtgtacattactggggggcgggggtctgaaaatggggtctcaaaagatgtctgggtttatgataccctgcacgaggagtggtccaaggctgcccccatgctggtggccaggtttggccatggctctgctgaactgaagcactgcctgtatgtggtnggggggcacacggccgcaaactggctgccctcccggcctccccctcagtctctctaaaagcaggtag

SEQ ID NO: 1680 - DNA, 431 bp, homo sapiens
  misc_feature (104)..(402): n=unknown
ataggtccaagaacaattgtctctggacggcagctatgcgactcaccgtgctgtgtgctgtgtgcctgctgcctggcagcctggccctgccgctgcctcaggangcgggaggcatgantgagcnacagtgggagcaggctcaggactatctcaagagattttatctcnatgactcagngacaaaaaatgccnacagtttagaagccaaactcaaggagatgcaaaaattctttggcctacctataactggaatgttaaactcccgcgtcatagnggataatncagaagcccagatgtggagtgccagatgttgcagaatactcactatttccanatagcccaaaatgggacttccaaagtnggcacctacaggattcgtatgatattacncgaggacttaancgcatatttacagtggattcgattagtgt

SEQ ID NO: 1681 - DNA, 472 bp, homo sapiens
  misc_feature (194)..(213): n=unknown
  misc_feature (418)..(418): n=unknown
gtaacatttattgacatctacccactgcaagtatagatgaataagacacagtcacaccataaaggagtttatccttaaaaggagtgaaagacattcaaaaaccaactgcaataaaaaagggtgacataattgctaaatggagtggaggaacagtgcttatcaattctgattgtgcaacaatgatatacaatccnnnnnnnnnnnnnnnnnnnnttctgcctgaagtttctatttctttcttgaattacttctctttccatatagtttctgaatgcctttaatatcatcctgggaaagtttaaaattttggggatctccatttccataggttggatacatcactgcattaggatcagaggaatgtcccatacccaaagaatggccaagttcatgagttgcagcatacaggaagttaatncctagactgctaccaatccgtccagcgttcatcctcatcgaagtgagcatctcc

SEQ ID NO: 1682 - DNA, 262 bp, homo sapiens
  misc_feature (51)..(220): n=unknown
cgctggtgtcatctgctcagccacccaaataaattctactacgacagattngtggcatccaacaactacaaccactgcaanaccctcttcaaantgtggtggcntcttattctatgccagtgggnnattctccagcccatcctaccctgcatactaccccaacaatgctaagtgtgtttgggnaatagaagtgaantctggttatcgcataaacctgggnttcagtaatctgaaattggaggcacaccataactgcagtttt

SEQ ID NO: 1683 - DNA, 499 bp, homo sapiens
  misc_feature (395)..(395): n=unknown
tgctaagaagtaagtattgacattttcattttgcagatgagaagcatggattctgggacgtcaggtctatgggccatccaggtcagaactctcttgacctcaccctgcaacgggtcctccaaggaccatgagccttgggggaggcgggaaccaggtctgattcaactccgtatgaccaggtgcagcacaatgtagggctcaatctgagttggaatatgacaccaagaggaacatcccaagtccccgagtcaggggtctgcgccccggtggacagtggggtctgagagcgaccacctaccgaggctccctcttctcggcgtgggggggtctgcagctggatgggacccaggacgacgtccaccttttcctggtaggagcccacatccctcttcganctcaacacacagcctcggtagcagcgggaagaggggtcatacgctctgcacaccaccattttacaacgcaggtacaccggaggggaagcggttcaggaagtgga

SEQ ID NO: 1684 - DNA, 380 bp, homo sapiens
  misc_feature (172)..(172): n=unknown
aaggaaattgacatctcctgtgtcaaaattgagcaggtgatcggagcaggggagtttggcgaggtctgcagtggccacctgaagctgccaggcaagagagagatctttgtggccatcaagacgctcaagtcgggctacacggagaagcagcgccgggacttcctgagcgaanctccatcatgggccagttcgaccatcccaacgtcatccacctggagggtgtcgtgaccaagagcacacctgtgatgatcatcaccgagttcatggagaatggctccctggactcctttctccggcaaaacgatgggcagttcacagtcatccagctggtgggcatgcttcggggcatcgcagctggcatgaagtacctggcagacatg

SEQ ID NO: 1685 - DNA, 461 bp, homo sapiens
  misc_feature (323)..(428): n=unknown
tcttggtgacgtctcgtggctggcaccgcttggttcttcccgtggcccgtggcctcctggcgagtggctggccctgcagtggatagagcaccaggagggccggcacgtggggcagagggggcggggcttggaggaagaggtgagccgaggcaggtgaatgtcaaacctccacagactgaatctggttcatctgcgcccgcatcacctggatactgttcaggatttttttctggtggccagccaaagtgaccccaacccggagaatgtcctccatcatcatctgagacacgacgtcaaaggaggtgaagccggcattggcgaantctccttgtactgccccatcttgatggcctccaancactcgtccaccgtgttaaactggtgtagtcggggatcgtgcggtccagcagcggcaggttgatgcagangagaagggcgccatggctttgaagctgttggga

SEQ ID NO: 1686 - DNA, 350 bp, homo sapiens
  misc_feature (127)..(195): n=unknown
  misc_feature (314)..(319): n=unknown
agcaggtggaggccttcctgcgagaggggctgctcatgcgtggcctgaaccacccgaatgtgctggctctcattggtatcatgttgccacctgagggcctgccccatgtgctgctgccctatatgtnccacggtgacctgctccagttcatccgctcacctcagcggaaccccaccgtgaaaggactcatcagcnttggctgcaagtagcccgcggcatggagtacctggcagagcagaagtttgtgcacagggactggctgcgcggaatgcatgctggacgagtcattcacagtcaaggtggctgactttggnttggnccgcgacatcctggacagggagtactatagt

SEQ ID NO: 1687 - DNA, 439 bp, homo sapiens
  misc_feature (32)..(32): n=unknown
cagtgttggtgtggtcactgctgagtccactntgcccagaagacagggtccacagcaggcactccataaatacatgttgcaggactgccctcactggctcactctgtggagtgagggacctaatgggccccatttacctattgcctctgaaagttaaagggcaggaacaaggtggagggccactgccctctggcctggcatggcccagaggcagcttggggttagctcaaggcagctaagcaggtccagcccaagaactaagtcaagtgggccgaggaggctctgagagtggccggggccggcgtacattccctggcatgggtgagaactgcggctgttctggacgcacattcatctcatgcgaggtgctgggggccaagttcatgtaggttgctggcagtgcacataaatggtcccccaaagcagtgcagacactatt

SEQ ID NO: 1688 - DNA, 476 bp, homo sapiens
ggagagtttggggaagtgtatcgagggaccctgaggctccccagccaggactgcaagactgtggccattaagaccttaaaagacacatccccaggtggccagtggtggaacttccttcgagaggcaactatcatgggccagtttagccacccgcatattctgcatctggaaggcgtcgtcacaaagcgaaagccgatcatgatcatcacagaatttatggagaatggagccctggatgccttcctgagggagcgggaggaccagctggtccctgggcagctagtggccatgctgcagggcatagcatctggcatgaactacctcagtaatcacaattatgtccaccgggacctggctgccagaaacatcttggtgaatcaaaacctgtgctgcaaggtgtctgactttggcctgactcgctcctggatgactttgatggcacatacgaaacccagggaggaaagatccctatccgt

SEQ ID NO: 1689 - DNA, 411 bp, homo sapiens
  misc_feature (2)..(62): n=unknown
  misc_feature (184)..(270): n=unknown
  misc_feature (372)..(372): n=unknown
annaaccncnnananncnnncnnaggtantnnntaaattnnangcncangctctngnccnancccagctttcagagcccacaagcagactgtacaaagtcaataatttaaaacccaaaccctgggcacagtgcctggaagtgtcagggtcacccactccccttaagttagccactatacatgtncatcttctgacaggcggggccaggacagacgccaggcacaggaatcagggcctggggtccctggaccacagccaccccctcccctngctccccactgtcccctggggcttgggagaggcagactgctcagaggaaataacctcaacaaataaattaaacaataaatagccccggtgggccgagggcanctccagggggtcacaccataaataacagagtttggcggc

SEQ ID NO: 1690 - DNA, 477 bp, homo sapiens
  misc_feature (296)..(296): n=unknown
ggtttgcggccatctacaggaggcaccgggggggctctgtcacctacgtgtgtggaggcagcctcatcagcccttgctgggtgatcagcgccacacactgcttcattgattacccaaagaaggaggactacatcgtctacctgggtcgctcaaggcttaactccaacacgcaaggggagatgaagtttgaggtggaaaacctcatcctacacaaggactacagcgctgacacgcttgctcaccacaatgacattgccttgctgaagatccgttccaaggagggcaggtgtgcgcancatcccggactatacagaccatctgcctgccctcgatgtataacgatccccagtttggcacaagctgtgagatcatggctttggaaaagagaattctaccgactatctctatccggagcagctgaaaatgactgttgtgaagctgatttcccaccgggagtgtcagcagccccactactac

SEQ ID NO: 1691 - DNA, 281 bp, homo sapiens
  misc_feature (225)..(241): n=unknown
tataaatattcagtgtacaggagtggtcctcaccccacccagtgaggattggatgaactaggctaaaaggaagggataactggccaagaaagggacatctatgtgaaagtgaaactgagacagtgctggtcacaggtcatgctgcagaataatacattcccaggcactgtcacgtgggggacccaaaaggccccaagagtgacctataacctctccagaagaccnntctgtgtggcatcanagtccaccacagtttaaggaaatatttaggacttaacaat

SEQ ID NO: 1692 - DNA, 496 bp, homo sapiens
gatgattccctgtgggacaagcacgcgtgcccagcctacgtgggacctgagatactcagctcacgggcctcatactcgggcaaggcagccgatgtctggagcctgggcgtggcgctcttcaccatgctggccggccactaccccttccaggactcggagcctgtcctgctcttcggcaagatccgccgcggggcctacgccttgcctgcaggcctctcggcccctgcccgctgtctggttcgctgcctccttcgtcgggagccagctgaacggctcacagccacaggcatcctcctgcacccctggctgcgacaggacccgatgcccttagctccaacccgatcccatctctgggaggctgcccaggtggtccctgatggactggggctggacgaagccagggaagaggagggagacagagaagtggttctgtatggctaggaccaccctactacacgctcagtgccaacagtggattgagtttgggggtagtcca

SEQ ID NO: 1693 - DNA, 452 bp, homo sapiens
gggagaagctgctggtcggactcacaatgaaaacgctccttcttttgctgctggtgctcctggagctgggagaggcccaaggatcccttcacagggtgcccctcaggaggcatccgtccctcaagaagaagctgcgggcacggagccagctctctgagttctggaaatcccataatttggacatgatccagttcaccgagtcctgctcaatggaccagagtgccaaggaacccctcatcaactacttggatatggaatacttcggcactatctccattggctccccaccacagaacttcactgtcatcttcgacactggctcctccaacctctgggtcccctctgtgtactgcactagcccagcctgcaagacgcacagaggttccagcttcccagtccagcacatacagccagccaggtcaatctttctccattcagtatggaaccgggag

SEQ ID NO: 1694 - DNA, 498 bp, homo sapiens
  misc_feature (445)..(445): n=unknown
ggattatgatagggacaaggatgataaaatttcctgggaagaatacaaacaagccacctatggttactacctaggaaaccccgcagagtttcatgattcttcagatcatcacacctttaaaaagatgctgccacgtgatgagagaagattcaaagctgcagacctcaatggtgacctgacagctactcgggaggagttcactgcctttctgcatcctgaagagtttgaacatatgaaggaaattgtggttttggaaaccctggaggacatcgacaagaacggggatgggtttgtggatcaggatgagtatattgcggatatgttttcccatgaggagaatggccctgagccagactgggttttatcagaacgggagcagtttaacgaattccgggatctgaacaaggacgggaagttagacaaagatgagattcgccactggatnctccctcaagattatgatcacgcacaggctgagggccaggcatctggtatatg

SEQ ID NO: 1695 - DNA, 514 bp, homo sapiens
  misc_feature (451)..(451): n=unknown
ccttacaaggtgaaatttcaatctgtacaggttgtgtctgccagttcagtccacagctcagagtatcaccttgtcctcattccatggtataagctgttgcgggggggcaggtctgcgggtcgtggattcactggactggatgggacatgatccagaactccgctccgtttggcttcccaaggatcccaccaactcattctaatcagtgatcactgaggaaatgcattgtattcctattcactatttcaaagatcaggcctacctcattggcatattaagaaagttttctcaagtatatttagtgtttatcattttactatagttcttcaaatgtctgacattcatcttttccctacctctaaattcctttctttttcacattatctttcttgattgctttttaatagaaaaacaaacaaagacatggatttactgtgcatattagcagatncatactggaaaatgcatggagggttcatatacaccacttacagtaagtaataactcagagtat

SEQ ID NO: 1696 - DNA, 406 bp, homo sapiens
  misc_feature (393)..(393): n=unknown
atcctgggcgacccagaagccctggagagacctgctgaacaaccacatcttgaagtcagctatgtgtgctgaagccatcgttgcggggctgtctgtagagaccctggagggcacgacactggaggtgggctgcagcggggacatgctcactatcaacgggaaggcgatcatctccaataaagacatcctagccaccaacggggtgatccactacattgatgagctactcatcccagactcagccaagacactatttgaattggctgcagagtctgatgtgtccacagccattgaccttttcagacaagccggcctcggcaatcatctctctggaagtgagcggttgacctcctggctcccctgaattctgtattcaagatggaacccctccanttgatgcccatac

SEQ ID NO: 1697 - DNA, 441 bp, homo sapiens
  misc_feature (64)..(64): n=unknown
  misc_feature (195)..(435): n=unknown
tctgtcacaatagggaaatctaagctctacataccatttcttttctacctggacagggccccanaaaagcctccaagccacgtgtagatgtgagacacatttgacagaacatttcaactcatagcttataatgatgccatttctccagctgtgcaagggctttacaaaaactgtgccaggacttcccatgaggcnggattgcttgattcatgtttnatgagcccacaatactgaagctccttttccagggacttggcataggcagtcaattccacatttggganaggtcctctctggaagtgaatgtcangcagtgacatccaagtttctgcanncagtgggntaacagccatgtttagggggaacatgatttaaaaagtacatctctctccctcctccccccacatgcacaaggctcacatctcantatggtgnggccca

SEQ ID NO: 1698 - DNA, 490 bp, homo sapiens
  misc_feature (96)..(96): n=unknown
  misc_feature (466)..(480): n=unknown
cgagtcattcacagtcaaggtggctgactttggtttggcccgcgacatcctggacagggagtactatagtgttcaacagcatcgccacgctcgccnacctgtgaagtggatggcgctggagagcctgcagacctatagatttaccaccaagtctgatgtgggtcggcgcctgccccagcctgagtattgccctgattctctgtaccaagtgatgcagcaatgctgggaggcagacccagcagtgcgacccaccttcagagtactagtgggggaggtggagcagatagtgtctgcactgcttggggaccattatgtgcagctgccagcaacctacatgaacttgggccccagcacctcgcatgagatgaatgtgcgtccagaacagccgcagttctcacccatgccagggaatgtaacgccggccccggccactctcagagccttcctcggcccacttgaacttagntctttgggctgganctgcttagct

SEQ ID NO: 1699 - DNA, 525 bp, homo sapiens
ggtcagtgttggtgtggtcactgctgagtccactgtgcccagaagacagggtccacagcaggcactccataaatacatgttgcaggactgccctcactggctcactctgtggagtgagggacctaatgggccccatttacctattgcctctgaaagttaaagggcaggaacaaggtggagggccactgccctctggcctggcatggcccagaggcagcttggggttagctcaaggcagctaagcaggtccagcccaagaactaagtcaagtgggccgaggaggctctgagagtggccggggccggcgtacattccctggcatgggtgagaactgcggctgttctggacgcacattcatctcatgcgaggtgctggggcccaagttcatgtaggttgctggcagctgcacataatggtccccaagcagtgcagacactatctgctccacctcccccactagtactctgaaggtgggtcgcactgctgggtctgcctcccagcattgctgcatcacttggtacagag

SEQ ID NO: 1700 - DNA, 474 bp, homo sapiens
  misc_feature (90)..(90): n=unknown
  misc_feature (428)..(469): n=unknown
gggcggcggaccgcggggcgctcatctggctctgctacgacgcgctggtgcacttcgcgctggaaggcccttttgtctacttgtctttantaggaaacgttgcaaattccgatggcttgattgcttctttatggaaagaatatggcaaagctgatgcaagatgggtttattttgatccaaccattgtgtctgtggaaattctgaccgtcgccctggatgggtctctggcattgttcctcatttatgccatagtcaaagaaaaatattaccggcatttcctgcagatcaccctgtgcgtgtgcgagctgtatggctgctggatgaccttcctcccagagtggctcaccagaagccccaacctcaacaccagcaactggctgtactgttggctttacctgtttttttttaacggtgtgtgggttctgatnccaggactgctactgtggcagtcatggctagaactccaganaatgc

SEQ ID NO: 1701 - DNA, 531 bp, homo sapiens
cttttccctatatcaccatttaattgaacaacaatacaacgaaaactggtcgccttaaaaccaatttgaaacaggttgttcaggagcaacaatacaaaaacaaagtgtagactggaatgtattacattttggccaaacaaaaagatttgattcattctggttcatgaagttagataatggtgtttatggttttgaaagttcactgaaacttcttcactgaactggtttctttctgatgcattttcttgagttctagccatgactgccacagtagcagtcctgggatcagaacccacacaccgttaaaaaaaaacaggtaaagccaacagtacagccagttgctggtgttgaggttggggcttctggtgagccactctgggaggaaggtcatccagcagccatacagctcgcacacgcacagggtgatctgcaggaaatgccggtaatatttttctttgactatggcataaatgaggaacaatgccagagacccatccagggcgacgggccagaatttccacagacacaatg

SEQ ID NO: 1702 - DNA, 387 bp, homo sapiens
  misc_feature (153)..(153): n=unknown
  misc_feature (277)..(348): n=unknown
gtcatccatatttctctgcatcttctcttggagtgagggaggctacctggaggggatcagcccactgacagaccttaatcttaattactgctgtggctagagagtttgaggattgctttttaaaaaagacagcaaacttttttttttatttanaaaaagatatattaacagttttagaagtcagtagaataaaatcttaaagcactcataatatggcatccttcaatttctgtataaaagcagatctttttaaaaagatacttctgtaacttaaganacctggcntttaaatcatattttgtctttaggtaaaagctttggtttgtgttcgtgttttgtttgtttcanttgtttccctcccagccccaaaccttttgttctctccgt

SEQ ID NO: 1703 - DNA, 327 bp, homo sapiens
  misc_feature (95)..(282): n=unknown
aactacctggtgcttcgagtggcattttctggagccactgcttgtgtggcccatgtggatggtgttgaccttcatgtggccaatactggcgatancagagccatgctgggtgtgcaggaagaggacggctcatggtnagnagtcacgctgtctaatgaccacaatgctcaaaatgaaagagaactagaacggctgaaattngancatccaaagagtgaggccaaaagtgtcgngaaacaggatcngctgcttggcttgctgatgccatttagggnntttggngatgtaaagttcaaatggagcatttaccttcaaaagagagtgata

SEQ ID NO: 1704 - DNA, 534 bp, homo sapiens
  misc_feature (27)..(27): n=unknown
  misc_feature (167)..(170): n=unknown
  misc_feature (358)..(521): n=unknown
  misc_feature (166)..(166): n=unknown
ggcagaccgtgtgagggggcctgtggncccagcgtgctgtggcctcggggagtgggaagtggaggcaggagccttccttacacttcgccatgagtttcctcatcgactccagcatcatgattacctcccagatactattttttggatttgggtggcttttcttcangcgncaattgtttaaagactatgagatacgtcagtatgttgtacaggtgatcttctccgtgacgtttgcattttcttgcaccatgtttgagctcatcatctttgaaatcttaggagtattgaatagcagctcccgttattttcactggaaaatgaacctgtgtgtaattctgctgatcctggttttcatggngcctttttacattggctattttaangtgagcaatatccgactactgcataaacaacgactgcttttttcctgtctcttatgggctgacctttatgtanttctctggaactaggagatncctttcccattctcagnccaaaaacatgggatcttatccatagancagctcatcagcc

SEQ ID NO: 1705 - DNA, 455 bp, homo sapiens
  misc_feature (2)..(97): n=unknown
  misc_feature (334)..(334): n=unknown
gngaagagagtcggcagatgatgcgggagaagaaggtcaccatcctggagctgttccgctcccccgcctaccgccagcccatcctcatcgctgtgangctgcagctgtcccagcagctgtctggcatcaacgctgtcttctattactccacgagcatcttcgagaaggcgggggtgcagcagcctgtgtatgccaccattggctccggtatcgtcaacacggccttcactgtcgtgtcgctgtttgtggtggagcgagcaggccggcggaccctgcacctcataggcctcgctggcatggcgggttgtgccatactcatgaccatcgcgctaanaactgctggagcagctaccctggatgtcctatctgagcatcgtggccatctttggctttgtggccttctttgaagtgggtcctggccccatcccatggttcatcgtggctgaactcttcag

SEQ ID NO: 1706 - DNA, 421 bp, homo sapiens
gccggtgctgagagaaccgtggctggcaaagatgattcaggcgattctggttttcaacaaccatgggaagccacggctagtccgcttctaccagcgtttcccagaagaaattcaacagcagattgttcgagagactttccatctagtcctcaagcgggatgacaacatctgtaacttcttggagggtggaagtttgattggtggctctgactacaaactgatctaccggcactatgctaccctctactttgtattttgtgtggattcctcagagagtgaacttggaatcttggacctcatccaggtttttgtggaaactctggataagtgtttcgaaaatgtgtgtgaattggatttgatcttccatatggataaggtgcactacatcctccaggaggtggtgatggtgggatggtgttgg

SEQ ID NO: 1707 - DNA, 199 bp, homo sapiens
  misc_feature (2)..(197): n=unknown
ancacagtcacatgcacacacggagatcagaaacctttcggccacagccccaggagcccggcgggggggagggcgggaccgacaggngcggngcggngccgtngaanactcctcctaccgagcctcccaggcgctcggngtttncataaacaagananctngagaggctnccctcaacantnngctggggaanngnnag

SEQ ID NO: 1708 - DNA, 189 bp, homo sapiens
  misc_feature (149)..(149): n=unknown
aacatgcagacatatttgtggacgtcctctaaaatgtagaatgtttcatacagaattatgatgcttggggtaaaaaaaaagtaggatgtttgttgagcttcgtagattatatgtaattgggaacctttggagtaaattttagtttctgngtccttacccaatatgaatttttttctattacagattgtc

SEQ ID NO: 1709 - DNA, 371 bp, homo sapiens
  misc_feature (100)..(167): n=unknown
  misc_feature (328)..(328): n=unknown
tcaaaagaaaaactgtagttctcctcagcattagcactaatttatggtaacaatcatttcttttaaatgtctaacttatttaaccccttcattttaaatngcaaattaaagcatgtatttacatatttatatacaaaaaacttcaaaaacaaattaatccaaatctnggtccaagagtttccactttataagtggtatggtactatgctatatatatcctcttccaaaagtctcttaggacttggtaagttccaaatattcattcacaaatggttcccctttaagcttaatgaaccatatacttcatttctgagtaaattagaggaantattacagaacacgctttgtacaaatacagcaccactactgag

SEQ ID NO: 1710 - DNA, 463 bp, homo sapiens
  misc_feature (9)..(132): n=unknown
  misc_feature (377)..(453): n=unknown
gtgactcangccctatagacctcacagtgaacatactcacaatggggtactggccaacntacacgccccatgggaagtgcanttaacccccagaantgntttaaactttcagggagtatttaaggcattttntcttggaaagcacagtggtcgaaaacttcagtggcaaactactttgggacatgctgttttaaaagcggagtttaaagaagggaagaaggaattccaggtgtccctcttccagacactggtgctcctcatgttcaacgagggagatggcttcagctttgaggagataaaaatggccacggggatagaggatagtgaattgcgcagaacgctgcagtccctggcctgtggcaaagcacgtgtgctgnttaaaagtcccaaaggaaaggaagtggaagatggagacaagttcanttttaatggagagttcaagcacaagttgtntagaataaag

SEQ ID NO: 1711 - DNA, 589 bp, homo sapiens
  misc_feature (159)..(337): n=unknown
  misc_feature (475)..(540): n=unknown
ggccaattaaactaattttattcaaagtaagtctacattaaattacaatattaacaatctctagacacaacgaacttataagaaaaaaaaatagaaatctgtttggtctttcttagaccacatatcatggaactcataaatgaaaattttcaaagatanaaatgacaattaaagagtgagggttttaatatgggaacccacgaggtggcctagttcnnacncgncggtntcnaaaagggnnnngtagnaatttagcncaaanncaaantangtaaacnnggnatattccagaanatattgctttaaacacttatgccatgatcaaaattcctttggnagcttttaatcaaaatgaaacatgctattatgtaaaatataaagtacttttaaatggtatctcaaaagtatctttgtcatagttacccttctaacatcactactgaactttcctttcactgttcaacctcatgtatanatacacaacacaaaaccaggtaccnacaaaatccttttaatctttccacnaaataaccctctgcntcacaacatcaagactttaagtctccataaacttttacagtttacagca

SEQ ID NO: 1712 - DNA, 452 bp, homo sapiens
aaacattatagaaacattcctgggcctcatatggttttggttcctaagtctacattacacaactggatgagtgaattcaagagatgggtaccaacacttagatctgtttgtttgataggagataaagaacaaagagctgcttttgtcagagacgttttattaccgggagaatgggatgtatgtgtaacatcttatgaaatgcttattaaagagaagtctgtgttcaaaaaatttaattggagatacttagtaatagatgaagctcacaggatcaaaaatgaaaaatctaagttgtcagaaatagtgagggaattcaagactacaaatagactattattaactggaacacctcttcagaacaacttgcatgagctgtggtcacttcttaactttctgttgccagatgtgttaattcagcagatgactttgattccggtttgataccaacaact

SEQ ID NO: 1713 - DNA, 477 bp, homo sapiens
  misc_feature (432)..(443): n=unknown
attgcattcccttagaaaaatggagaactgtttatgtacccaatctgcacatataaaattttatacaaattatgtgtagcacataaaggcctctggtacagctaaaatcctgacactataatttgggtattcctgctttagggtctccagtttatcaggtctgtccatagaaaacagaaactggaattatagtcagtcttgctaacacttagaaactactttaaaatacaataaaattttcatttaccctaaaagtccaaatgggaggggatatattttgttaccaatttcaatgtaacagtatgacaaattcacacctcattttggctgggctttcaaaattaaaaaaaaaaaatcaccttagttctgacattatctaagttgtggctgcttcagaaggtcatatgaccaaatatttaccaaataattaanaataataatantaatattccttttacaaaatggtcagtaatacct

SEQ ID NO: 1714 - DNA, 441 bp, homo sapiens
  misc_feature (99)..(112): n=unknown
  misc_feature (397)..(397): n=unknown
gtcacttactgctccatgctggagaaagccatatccttctgggacttgagtctgcacatttaactacagcatctttggggcctacagcatggatgtgantantggcacatcntttggagtgaacatcgactctctcaacaatccacaagacccctttgtggagagcactaagaagttcctaaaatttggtttcttagatccattatttctctcaataatactctttccattccttaccccagtttttgaagcattaaatgtctctctgtttccaaaagataccataaattttttaagtaaatctgtaaacagaatgaagaaaagtcgcctcaacgacaaacaaaagcaccgactagatttccttcagctgatgattgactcccagaattcgaaaganactgagtcccacaagctctgtctgatctggagctcgcagcccag

SEQ ID NO: 1715 - DNA, 447 bp, homo sapiens
  misc_feature (368)..(430): n=unknown
ttgaaatctctggtgttctggggcacagctttcttgaagaccaaagtagaaatccttagaataactcattctccacttagggttccatctcttgaatccacctttagaacaatgggtttttctggttgaagaagtccttgcgtgtctaatttcaaggggatctgtgtttctttacaaggtttgaaggagaagttctgaaggactctgattagagcaagtttcatgttcatgagagcaaacctcatgccaatgcagtttctgggtccagttccaaagggtgtgtatatgtaaggatctatgctgtccttcttcttactgaacctttcagggcggaactcctcaggctctgtccagtactttggggcatngtgaagancntaagtggaatcancaccattgaccctttgggaatgaatacccccattgattnaacatcttcttgcaagt

SEQ ID NO: 1716 - DNA, 458 bp, homo sapiens
  misc_feature (448)..(448): n=unknown
ccaaagcacatctcctgctacaggcacatctcagccgagccatgctaccctgcccagattatgacactgataccaaaacagtcttggaccaagctctcagagtatgtcaggcaatgctggacgtggctgcaaaccagggctggctggtgactgtcctgaatatcaccaacctgattcagatggtgatccagggtcggtggttaaaggactcttctcttcttacactaccaaacatagaaaaccatcatcttcaccttttcaagaaatggaagccgattatgaagggcccacatgctaggggtcggacctccatcgagtgccttcctgaactgatccatgcctgtggagggaaagaccatgtatttagctccatggtagaaagtgagctacatgctgcaaaacgaaacaggcatggaatttcttatctcacttgccagtgataaatgtnggcataagtg

SEQ ID NO: 1717 - DNA, 411 bp, homo sapiens
  misc_feature (11)..(376): n=unknown
gtctacatttnctaagancagtatatngtnttctttgtnatcatcattaggctccataatanaattnnncatcatatatnatnnnacatttatnactacaagacattcttgangctacttctacatgtnatcatatcanagtataaatctnncnaacaagacacgctgtgtaccaccttacagatttatagttnatgcggcaganttaganatctgtnacaagtcctaacacttgtcacatctcaatgtggttttccttaanaanngcagccaatatccatgtnaacagtacattgtnagangtaaaantngantganagctcctaaatatcatcccanatatacncaaattannagantattctaaatgcttttncatcttacatatcaagacactcataaagataacat

SEQ ID NO: 1718 - DNA, 539 bp, homo sapiens
  misc_feature (92)..(197): n=unknown
  misc_feature (431)..(520): n=unknown
atttccataacttttcttatctgaaaggactcaagtcttccactgcagatacattggaggcttcacccacgttttctttccctttagtttgnttgctgtctggatggccaatgagcctgtctccttttctgtggccaatctgaaggccttcgttggaagtgttgtttacagtaatcctnaccaagataacatactgncctccagaataccaagtattaggtgacactagctcaagctgttgtcttcagagcagttaccaagaagctcggtgcacaggttttctctggttcttacaggaaccacctactctttcagttttctggcccaggagtggggtaaatcctttagttagtgcatttgaacttgatacctgtgcattcagttctgtgaatactgccctttttgggcggggtttcctcatctccccaggnctgaacngctcaanctctaaaccccaaattagtgtcagccgaaaggaggtttcaagatagtcctgtcagtattgtggtgaaccttcagnttagaacagtctttcattt

SEQ ID NO: 1719 - DNA, 528 bp, homo sapiens
  misc_feature (515)..(515): n=unknown
aagctagtgcaagtacaatattttacactggaattacagagagtatgcacgcatatggaaaaaagttctcctgtcacaataaaagctcttaactattatgtatgcacttaaaattttcttttcaataaggtgcaaaacatcattccttccctagttctcctctgtactggccatgtcagtctggtagtgccctcaacccaagttctggtgtctgttttcccttggcctgtgggaggcatatggtgggtaatgatctgatattaaaacatccagtagtacgagtctcagagatggctctggagccaggactccactggctggaaatgaagactgtctaatctgaaggtcaccacaaatactgacaggactatcttgaaacctcctttcggctgacactaatttgggtttagagttgagcagttcaggctggggagatgaggaaaccccgccaaaaagggcagtattcacagaactgaatgcacaggtatcaagttccaatgcactaactaaagganttaccccactcct

SEQ ID NO: 1720 - DNA, 392 bp, homo sapiens
  misc_feature (143)..(143): n=unknown
aaaaattcttaacatctttggagttattaaaggctttgtagaaccagatcactatgttgtagttggggcccagagagatgcatggggccctggagctgcaaaatccggtgtaggcacagctctcctattgaaacttgcccagntgtctcagatatggtcttaaaagatgggtttcagcccagcagaagcattatctttgccagttggagtgctggagactttggatcggttggtgccactgaatggctagagggatacctttcgtccctgcatttaaaggctttcacttatattaatctggataaagcggttcttggtaccagcaacttcaaggtttctgccagcccactgttgtatacgcttattgagaaacaatgcaaaatgtgaagcat

SEQ ID NO: 1721 - DNA, 527 bp, homo sapiens
actgttgcacataacagcttttatacaatgataaggacatatcatttgtttacaaagaaagtctaaaatttcaagaacattcaaagagctaacacagtaaaggtcatgcaagttctagaatagtgaatcatgacagaactcattcattttatcctttacctccaaaaggcccatctccttaacgagaagacatctcaagaccaggagcttgtcactagtctgatatttcattcaggaatattgagcctgttagcacgtactggcttgataggaagtaactcaaccctaactgtagaaaagggttttctgaagagactcactgctgcaaaatgcatgccctgtattcatattgtgttatacgatgaacatgccacatgctttcatttaagtacgtgtgcgtaacacccgaaccaggaatctcagctatgaccttttcacttagctacgctaaatgtcagtccaagataaaagaggggttaagataaactgaggttaaagagactgtgagtagtgacacattcaagtga

SEQ ID NO: 1722 - DNA, 469 bp, homo sapiens
  misc_feature (301)..(301): n=unknown
ggcatgtccaatgtatgacttcatgagttatacagatgctaattcttaggggcacttggaatcacatggttgttttgtgtcccatggtcaagcattctatcttaccagggcctacagtaacatgccaaaagttgcttccaacatatttctctgctttggatggggcatatttctgtgctgtggatgacatggccttactccagaatcccaggccctccactgtgactctcctactggtgcttggttcagctccaccccaaatcttaccccaccactggcactttcagcaccagggggtctnaaggatggtgactgcaccatggcctggatctgctgcagtgtcctttcctgtggaggctccactcaaagctggcatcctcctatgtcacctagagtgtgggtcaaaagcaatacacctacatgtagaatgtgatgtcagaaactcaaaacaggctcaccaggcagtgtg

SEQ ID NO: 1723 - DNA, 675 bp, homo sapiens
  misc_feature (23)..(23): n=unknown
  misc_feature (560)..(635): n=unknown
gttgactgggatggatgagtaanaggaggaaggtacactagaggctttggtaaaacatcttctctccagagggtgaagataaataaaccttacagagattcagaagtggccactgcagtgaagttttacaggtctagtggttaggggcatccaggggtgtcccttccaatgtgaaagacaaactgttgcatcttgcatcctcatgcaaggaaggaagcacactgcctggtgagcctgtttgagttcctgacaatcacattctacatgtaggtgtattgctttgacccacactctaggtgacataggaggatgccagctttgagtggagcctccacaggaaaggacactgcagcagatccaggccatggtgcagtcaccatccttcagaccccctggtgctgaaagtgccagtggtggggtaagatttggggtggagctgaaccaagcaccagtaggagagtcacagtggagggcctgggattctggagtaaggccatgtcatccacagcacagaaatatgccccatccaaagcagagaaatatgttggaagcaacttttngcatgttactgtangccctggtaagatagaatgcttgaccatgggacaccaaacaaccatgtgatttccaagtgnccctaagaattagcatctgtataactcatgaagtcataca

SEQ ID NO: 1724 - DNA, 369 bp, homo sapiens
  misc_feature (52)..(52): n=unknown
  misc_feature (313)..(313): n=unknown
ggttgatgcagatgtgagtgaggagagcagtgtgggaagggagactcatgangggaggggaagctgccactctccagtgtgttcagtggctgcaatgagatgagactgaaccccttgctatactatcatcagccccaaactttccaatctactttatcccattattcagcacattcccagcacaaagaacctggtggtcagtgacagcatcatcacggacattactctgctgtcctttttctgacccgtcctcttggaggactcagtatatccgtcacaacttcctcctccactgagtgctccattttcttcngcaacagtctattgccagaacatgaattcgggcaactggtgtctgtgctcaaccag

SEQ ID NO: 1725 - DNA, 551 bp, homo sapiens
  misc_feature (498)..(499): n=unknown
agactggggtaggtaaaactattgaagattaacaaggcaaactcagcagagaagagagtgtccaggttgagttgagttggagagatggtccggtttaatttttgactccgttgtaattgctggatcagttctagacatgtattttccagctgcctctagtttttgaacttgcagacaaaggagaacttgtcttcacaaggcacatccttccatttctggaatcctgtgcttgaggtcaggctcacacagtagccaggattaacactgcttggggctccaatgccccaggacttgtaggagaccagggacccactgctccagtgccagcggcggttctagatggggaagggccagaacagaggcagtggtcactcaaaaatacatggaatcactgggcctgtgtgcacactcagaaacatgctaagacacaaaggaagaataaaccttgctaaatattgtttccttcctttgctattgtctaaacttcttcctgaactnnccaactcattaactgtattcaccaagaataagtgttatgaattgacagagac

SEQ ID NO: 1726 - DNA, 465 bp, homo sapiens
  misc_feature (91)..(134): n=unknown
  misc_feature (367)..(424): n=unknown
gaggctttaaggtagctttaaattcgtgttgtcctgggagctcgcccttttcggctggagtcgggctttacggcgccggatggctctggangtgaagtctcgggcaaagcgttatgagaagctggacttccttngggagggacagtttgccaccgtttacaaggccagagataagaacaccaaccaaattgtcgccattaagaaaatcaaacttgggacatagatcagaagctaaagatggtataaatagaaccgcttaagagagataaaattattacaggagctaagtcatccaaatataattggtctccttgatgcttttggacataaatctaatattagccttgtctttgatttatggaaactnatctaganggtataataaaaggataatagtcttgtgctgacaccatcaacacatcanagcctacatgttgatgactcttccagggttagaatatttac

SEQ ID NO: 1727 - DNA, 122 bp, homo sapiens
  misc_feature (36)..(121): n=unknown
catttaataaaaataacccatagttttacatatttnacatgtgtagaatatttacaaactcacttctacagcatttacttaatgtttactatntttccattatttgcctttttggctattnc

SEQ ID NO: 1728 - DNA, 336 bp, homo sapiens
  misc_feature (30)..(52): n=unknown
  misc_feature (266)..(314): n=unknown
gctggttataatccttcaatatcaattgtnggcacacttgaagctgaaaaanaaagaagaaaatctgggctatcctcaagagttcagtttcgaaaccaaggttctgagcccaaatatactcaagaactaactctgaagaggcagaaacagaaagtgtgcatggaggaaaccctgtggctacaggataatatcagagataaactgcgtcccattcccataactgcctcagtggagatccaagagccaagctctcgtaggcgagtganttnacttccagaagtgcttccaatnntganttcagatnaacccaaganagctcatattgatgttcacttc

SEQ ID NO: 1729 - DNA, 289 bp, homo sapiens
  misc_feature (278)..(278): n=unknown
gacccttgactctcaagtgtacggggtcccatttacacagggggagagcttacagcctacgttgagtctatacttaccacttagtgagcatggtatccgctcaggggcctctgtgggcatccatctcctctgcagcatctttcctccccaccgctgggcctgcacatgaccccctccttgggttagacctctgatcagtgatgaccttggtatgctggtgatggtcagtcttggcaccaaatgagacagtttatgtcatcagctattcaataaaacantaatctaggtg

SEQ ID NO: 1730 - DNA, 547 bp, homo sapiens
  misc_feature (394)..(394): n=unknown
aaaaaagatcccatagaaatgtttcattctggacagctggtaaaagtctgtgccccaatggttcgatattcaaagttggcttttaggacactagtaagaaaatatagttgtgatctgtgttacacaccaatgattgttgccgctgattttgtcaaatctataaaagccagagacagcgaatttaccacaaatcaaggtgattgcccattgattgttcagtttgctgctaacgatgcaagacttttatctgatgctgctcgtatagtctgtccttatgcgaatggaatagacattaactgtggttgccctcagaggtgggcaatggcagaaggttatggggcttgcttaataaacaagccagagcttgttcaagacatggtgaaacaagtaaganatcaagtggaaacccctggattttcagtttctattaaaataaggatccatgatgaccttaaaagaactgtagatcttgtcaaaaggctgaagccacaggagttcatgggattacagtccatggaagactgctgaagaaagacatcagccagtg

SEQ ID NO: 1731 - DNA, 181 bp, homo sapiens
  misc_feature (11)..(155): n=unknown
aggaaaaaatnnccactctacncatccccccaatatctatagaacaggattcagagcagtatttgtcaatgtttgcctaggatgatcaggatgtttgaaccactgggantnttctttaanctgggtagttctgggnctactccagatctaccnnntcataatctctgagggtggtgtctac

SEQ ID NO: 1732 - DNA, 277 bp, homo sapiens
  misc_feature (63)..(63): n=unknown
  misc_feature (211)..(248): n=unknown
acgggctggagcagtctgaggaagtggggcaaggaatgccgctagtctctgagggagaccganggagcccctttcaggaggaggaggggagtgctctgaagacctcttgggcaggggctcctgttcacctgggccagggtcagttcctgaagttcactcagagggaaggagatagagagtcctggtcctcaggggaggactaggaaaagancatctgcccggcactggggacttaggggtgcngcgangggaaggacgcctccaagccccgctccct

SEQ ID NO: 1733 - DNA, 320 bp, homo sapiens
  misc_feature (18)..(311): n=unknown
tcattgagcatattcttnattttgtgccatagccatggctgctccatccctgagactaggtcccttgctcttcagccagaangagtcagggcaatgaatttgaagacattcaagtcatgctgagctcaaagctgtattnaggtgggtctcccaagttgtttccagctatgtntgtctaagatgcttggctacagcttcactgtacacaaaaccagcgtcacttcgctttacggatttcnnaacacagatctgctccatcccataaattcgaaaaccatgtaaagcattccatctgaggctatatgtctccnataattcta

SEQ ID NO: 1734 - DNA, 261 bp, homo sapiens
  misc_feature (50)..(255): n=unknown
agactaggtcccttgctcttcagccagaaggagtcagggcaatgaatttnaagacattcaagtcatgctgagctcaaagctgtattaangtggnctccaanttntttccagctatntttgtctaagatgctggctacagttcactgtacacaaaaccagcgncanatcgctttacgntttcannacacagatcttgctnccatccatnnattcgaaaaccatgtaaagnattccatctgagctatatgtctccantaactc

SEQ ID NO: 1735 - DNA, 559 bp, homo sapiens
  misc_feature (429)..(491): n=unknown
attggcattcccttcaccctcctgttcctgacggctgtggtccagcgcatcaccgtgcacgtcacccgcaagccggtcctctacttccacatccgctggggcttctccaagcaggtggtggccatcgtccatgccgtgctccttgggtttgtcactgtgtcctgcttcttcttcatcccggccgctgtcttctcagtcctggaggatgactggaacttcctggaatccttttatttttgttttatttccctgagcaccattggcctgggggattatgtgcctggggaaggctacaatcaaaaattcagagagctctataagattgggatcacgtgttacctgctacttggccttattgccatgttggtagttctggaaaccttctgtgaactccatgagctgaaaaaattcagaaaaatgttctatgtnaanaaaggnccaggaccaggatcaggtgcacatcatagagcatgaccaactgtccttctccncgattcacagaccaggcagctggcatgaaagaggaccagaagcaaaatgagccttttgtggccaccca

SEQ ID NO: 1736 - DNA, 509 bp, homo sapiens
  misc_feature (463)..(463): n=unknown
agctaaatgatctaaatgcaaaccccaaagtttccagttaaaagtataaaatctgcttctaaccacagcagcatactgcttcaagtattctcctcctatgtaaggtcgagataattttgtcacatatgaattttaggtggacatctcatttcctcacatattagacatcctgctggggtcacagcttctttgttccatttgtctttttttgttgttttttaataagacattgcaaacagtagctatttcttaaagtgacataattttcgcttttgcattctgataaaaatgaacatacttaagcctcttccttgcaccctgaccctggtgctctagcataatgcaacaaatcctacgctcaatggtttgcagggccatccacgcaggcagatgactgggtggccacaaaaggctcattttgcttctggtcctctttcatgccagctgctggtctgtgatcgangagaaggacagttggtcatgctctatgatgtgcacctgatcctcgt

SEQ ID NO: 1737 - DNA, 553 bp, homo sapiens
  misc_feature (543)..(550): n=unknown
ggtcatctgaacctctacctgctcctggactgttcgcagagtgtgtcggaaaatgactttctcatcttcaaggagagcgcctccctcatggtggacaggatcttcagctttgagatcaatgtgagcgttgccattatcacctttgcctcagagcccaaagtcctcatgtctgtcctgaacgacaactcccgggatatgactgaggtgatcagcagcctggaaaatgccaactataaagatcatgaaaatggaactgggactaacacctatgcggccttaaacagtgtctatctcatgatgaacaaccaaatgcgactcctcggcatggaaacgatggcctggcaggaaatccgacatgccatcatccttctgacagatggaaagtccaatatgggtggctctcccaagacagctgttgaccatatcagagagatcctgaacatcaaccagaagaggaatgactatctggacatctatgccatcggggtgggcaagctggatgtggactggagagaactgaatgagtagggtccaagaaggatngtgagangca

SEQ ID NO: 1738 - DNA, 580 bp, homo sapiens
aaattccatgtgaaagtgaaacaagcatgagtcaagtcaaccagggaaggaatctggggacaggccaaggagcgggaggtggggcagcgaggcagtcctgctggtaggagccctgaggatttcccagcttgtgtgcgctgcctctggcatcctagagacccggatttactcagctaggagagaggatggatcacagggtctaagggtggccattcagaggtagaagatggaggggcggcagattctggcagggcagcagagggctcagtggccatggctagaggggtaaaaaattcaggacatcccccaggtgctgcctcagccagggctgcatgcggaagagattgatgtgaaagtctcgtggcggcgggaccttgctacgaggggcccttttgcgggagtttttgtcagcagagccaaggcaggggttgtaaagaccccagctcaccagacccacctgaaaaaacctgaatctccgctcaaggaaaactgctcccccagattctcccttgcagggactctcatcctcctgggtcccactgcataggaactggtctgtcaccacctccctgacatctgt

SEQ ID NO: 1739 - DNA, 550 bp, homo sapiens
  misc_feature (382)..(382): n=unknown
  misc_feature (527)..(527): n=unknown
ggaagtaatacataatcttccagattttgaactactttcggcaaacacactagaggatcgtttggctcatcatcggtggctgttattttttcattttggaaaaaatgaaaattcaaatgatcctgagctgaaaaaactaaaaactctacttaaaaatgatcatattcaagttggcaggtttgactgttcctctgcaccagacatctgtagtaatctgtatgtttttcagccgtctctagcagtatttaaaggacaaggaaccaaagaatatgaaattcatcatggaaagaagattctatatgatatacttgcctttgccaaagaaagtgtgaattctcatgttaccacgcttggacctcaaaattttcctgccatgacaaangaaccatggcttgttgatttctttgccccctggtgtccaccatgtcgagctttactaccagagttacgaaggagcatcaaatcttctttatggtcagcttaaagtttggtacactagattgtacagttcatgagggggctcctgnaacatgtataacattcaggctta

SEQ ID NO: 1740 - DNA, 431 bp, homo sapiens
  misc_feature (120)..(422): n=unknown
ttaaaagcaaataacaaagaatacatgatgactctattcttgttctcatgtgtgaaccatatattatagcctgcaaagtctaaaatatttataaaccggccctttacagaaaaagtttgnagacccttcttttacancagtgctgtagaaaattctggnaggtacaactgcaagtctaagataaatgttcattcattcccatcataaatgtnacattctaaataggtgtcctctgatgncnccngtcngantttcttttaaacgttttnttcatncnccacattntnaangctcatccntantcctcntgccttgatttcngagagtttccaanttttcacttattaangcagcgantgcttttgcatcnctggcanttatctgctcctcttgaaaatttctctttgctctntcgtagananaaaacttaa

SEQ ID NO: 1741 - DNA, 448 bp, homo sapiens
  misc_feature (57)..(433): n=unknown
ccgggctgccggccagacccccaagacggcctgcgtagatatccctcagctgctggncgncgcggtnngggcgggggctccgggcagtgctggcggcgtcctggctgccctgctggaccatgtcaggagcnggtcttgcttccacgccttgccgagccctcagtacttcgtggactttgtgttccagcagcacagcagcnaggtccctangacgctggccgagctgtcagccttgatgcagcgcctgggggtgggcagggaggcccacagtgaccacagtcatcggcacaggggagccagcagccgggaccctgtgnccctcatcagtccagcaacagtccagtgtgtgggacacggtatgcctgagtgccaggnaacgtgatggtgcatatggactgtcggaacagctggggtgaccccggaggcctggggncaactgagcctgcct

SEQ ID NO: 1742 - DNA, 464 bp, homo sapiens
taggggcttctggtttctgggctgtaggtttgtgaggtgtgggatcttaagtcaaaggtgggggactagggcagggtatcagaaggtgatgtcatcctcgtacagggacagcagcagcaggacggtccagccgcccagcaggcccacgttgtgcagcaggaagaggagccagggccgcgggtcccgtactttcaacatcgccgggagcatgtcgcagagtgctacgtagaggaacaggccggtggccactgccaggatccaggcctcgctctcctcgctgactccaaccgcgagtgccacgtagagaccagcgaaggccgtgagcgcggaggccaggttcagcagcagtgcttggcgcacggacagccccgcgtgcagcaaggcggcgaagtcccccagctcgtgtggcaactcgtggcagaacacggccagcgaggtggccaagcccggtcttccaggaagga

SEQ ID NO: 1743 - DNA, 185 bp, homo sapiens
tttaaatttttttcatttgtttccctgcctagaggctataaaaactctatttcaccaccccaagtgtctttataaatctcaaccacatatttttaaatgttgtgccattggtctcaaggatgaatcagatacaaaagtattcatgccaagatgtaaactcaccgtcatcactagagaaaagatat

SEQ ID NO: 1744 - DNA, 554 bp, homo sapiens
  misc_feature (411)..(411): n=unknown
ggaaaatatgaatgctaaatcaaattttttaaaaaatacaccacacgatacaactcaatacaggagtatttcttctcaaattcttctagcaccatcaacattcttcaagtatctgaaatactattaattagcacctttgtattatgaacaaaacaaaacaaggacctcagttcatctctgtctaggtcagcacctaacaatgtggatcacactcatgggaaagtgttttgaggtagtttaaacctttggaagtttgggttttaaacttccctctgtggaagatattcaaaagccacaagtggtgcaaatgtttatggtttttatttttcaatttttattttggttttcttacaaaggttgacattttccataacaggtgtaagagtgttgaaaaaaaaattcaaatttttnggggagcgggggaaggagttaatgaaactgtattgcacaatgctctgatcaatccttctttttctcttttgcccacaatttaagcaagtagatgtgcagaagaaatggaaggattcagctttcagttaaaaaagaagaagaag

SEQ ID NO: 1745 - DNA, 440 bp, homo sapiens
  misc_feature (248)..(338): n=unknown
cagtcatcctggagatgtagaaagatctgagagagagaaagctggtgccttctttgcatatgagaaagtcattcagttatctaaggcacacatttatctaggacatagaactttcagggcaaaaacaacaatcaaagaaataaatccaggcatttgatttgaagagcttaattgcattcagatttgcttttatactgagtgttagggaatataaaataaaaatatcatactaagcattgcctattacnttcnaatactttcaaatttgtcattcacccagcaaccttataagtagtaatgnttttatcatacaactatttctacacttgacagatganggagcaagactcagagggactcactcacatgctcttctggttgcaaagttggatttgagtggggccaggagtgaaaccaaatcccctggctgaaaggaccgt

SEQ ID NO: 1746 - DNA, 436 bp, homo sapiens
gccatgcctttctgctaatcgattttagcaagtcgaggtaaaacacatgcaacattttctggcaaaagcttaatgtcaaacaatatgtgatccatactgtgtgtcgtccttgggggtttatttgactttgtcacaatgacagccaacagtgagactgataagcctgtaaaaataaaaaaataagactaatcaaatagacatggcattttaatctcaaagtgcaaaatcatctaactgaaaatgacggcattgaaaaattccagtggttaaaaatgaatcaaaacttcattacgcaggcagtggaagtgtgttgaaagatttaccaggggtgtcaagttttagacactcagaaaggcaccattctagccatcttgattggataacatgtatatacttatgtccctacgatattcaaaagataatactgttttagtac

SEQ ID NO: 1747 - DNA, 338 bp, homo sapiens
  misc_feature (2)..(97): n=unknown
cntgggctgctcccgccccagcntggcccagggtgaaggaagaggcacgtgctcctcagagcagccgganggaggggggaggtcggaggtcgtggnnggtggtttgtgtatcttactggtctgaagggaccaagtgtgtttgttgtttgttttgtatcttgtttttctgagagggtgggggctggaacccctccccgggaggagtgccatctgggtcttccatctagaactgtttacatgaagataagatactcactgttcatgaatacacttgatgttcaagtattaagacctatgcaatattttttacttttctaataaacatgtttgttaaaaca

SEQ ID NO: 1748 - DNA, 325 bp, homo sapiens
gtcaaaaggcatttttataaagacatgtgcccttcttgggtggtatactggcaatttttaaaatatctgatttattgtcagctcaccacatgatgtgatatttgttcatgttgaagtagtgtgaaagtaggcacattagtatgaaagtatttctattaaagctgaattgctataataacactaaatcctgtgttggcatggaataactagatggttttaagaaagtactttctttgaagattggagaaagtactttaatttaaacattaaaaagattggtaactgctattttcaacagcatgtccccttaatcagtgtgtcattg

SEQ ID NO: 1749 - DNA, 428 bp, homo sapiens
  misc_feature (400)..(400): n=unknown
taatggtaaacaaagatgtaagtacaaaacatcaaaatacgttatcagtagttctaaacagccatagtagtcacagtgccagaagtgaggtcactcacattttaaggaaatataattcactctatttcagtggaatccatgttctggcagttggaaggcaaaggtgaggcttactttgtgcaaaatgtattcactttattcgaaagcagctttcttttctgtcccttgcttggcattttaaagaacctgttcattttccttttttgttaaaagtgctctaagaactaaaagggccgttccttactggaataaaattaactacacatgccatacatttctggggtcaatgttgctgggttaaaattcccctcagaatttagccaattccatagaaaaattnaattgttaaggtaatccgcacttccatg

SEQ ID NO: 1750 - DNA, 223 bp, homo sapiens
  misc_feature (60)..(195): n=unknown
cgacgtcttttcaccactttgggcatgcttcttatttagtatgttcatcatgatttagtnnnnnnnnnnnnnnnnnnnnnnnnnnnnnnnnnnnnnnnnnnnnnnnnnnnagtaagcatgttaagtttgtaagcnttgttgatttccaccacaaacccataggacctcaggttattctcataattgaggaaactnagattcccagtgttgaatgaaagccaca

SEQ ID NO: 1751 - DNA, 449 bp, homo sapiens
  misc_feature (60)..(132): n=unknown
taaagtaattcttcttccacttaatttttaaagacagtaattgctacactgaatgaaaccttaatgaagtttcattataagtatctattatcatttgattattttctacatagaagcatgcaaaaagtttaaaattcagtttcatttgacttagccttgactgtaatggaggactctatgaagaggggacacagtgcttatgggctggagtcccagcaactgcttggtggcagagtcccagtcgttccccagttcaagccgtgggcagatagatgggtactgtccttcagttcttcttacccattcacttgcttgctttattgcctcaaaagcccagggaatattcctagattaaaaaaaaaagtttcagatttcagaatataacatgtgaaatgtaatgtggtactaaacccatcacattatatcagacaaaatgattctgccaaaaa

SEQ ID NO: 1752 - DNA, 236 bp, homo sapiens
  misc_feature (132)..(132): n=unknown
tttggtgccatgactcggatcgggggacctcccttgggagatcaatcccctgtcctcctgctctttgctctgtgagaaacatccgcctacgacctcaggtcctcagaccgaccagcccaagaaacatctcancaatttcaaatccggcactcccagagcccctggaactccggcccaaggctctctgactgactccttcccagatcttctcggcttagcggctgaagactgacact

SEQ ID NO: 1753 - DNA, 526 bp, homo sapiens
ggcctaataaaaaggagcgtctatacaggaccttaaatgggctgtaccttgtagcattctgaggacaggccagaattctgagaagggaaagtggtaaaaagtattgtccagtcctttttaaattggtggctgagcttggtgaggtgtgtttttaaaagacctttagtccattctacttttcttgaagacggaggaccgtaagggatataaaggtttcactgaatactaagaacctgaaaaactgcttggctgatatgactaataaaggctcgtctgttatcagactgtattgaggtgggaaggctaaactgaggaattatgtctgacagaacagaagaaatgactgcggtggccttctccgaccctgtaggaaaggcctctacttattttgagggcctctaaaagtattaaagcagcggcagccactgcacgcagacatgagggctaggctaaaacagtaaggtcaagttgtttggacagaaaggctacagggtgtggtcctggctcttgtgtaaaaattctgact

SEQ ID NO: 1754 - DNA, 480 bp, homo sapiens
  misc_feature (47)..(190): n=unknown
  misc_feature (388)..(467): n=unknown
ggctcgcgcttcgttgtcagatctgaggcgaggctaggtgagccgtnggaagaaaagagggagcagctagggcgcgggtctccctcctcccggagtttggaacnggctgaagttcaccttccagcccctagcgccgttcgcnccgctagcctggcttctgaggcggttgcggtgctcggtcgccgcctangcggggcagggtgcgagcaggggcttcgggccacgcttctcttggcgacaggattttgctgtgaagtccgtccgggaaacggaggaaaaaaagagttgcgggaggctgtcggctaataacgaaggtgacctgctgagaaaagtggtacaaatacttggaaaaacctgctcttctgcgttaagtgggagacaatgtcannagttaaaagctcttattcctatgatgccccctcggatttcatcaatttttcatccctggatgatgaaggagatactcnaaacatagattca

SEQ ID NO: 1755 - DNA, 528 bp, homo sapiens
  misc_feature (474)..(518): n=unknown
aaggcaggccttttcatgtagaagagtcaggtccataactcggtagcatttaatttgaaaggttacccacattgagctcataccagtgtgaaacttccatggcattatcttttaaatccctaagattaaaaccccacacaaatgcactcaaagcaacccaacatcagtatcctgcagtttctatgggccctttctgcagcctttactcatggaagacaagggatctgggtttgtttaggaaacattttgtgagcattgtccaagccctaagtatggttggcctaagctttgctgaagctaagatcagtctgtttatgtttgcttaaaataggaacttaaaggactaaaatgtcatcgttatttatcctgattatagcctaatggtattttatttctctacagcaatatgactgctaaaagaaccaacccaggacagagccacaatcttcctctaattcattgtaatttatatanttcacttgtaatcattgtaaaactttgtaantagtggaacatantccccacagt

SEQ ID NO: 1756 - DNA, 446 bp, homo sapiens
  misc_feature (407)..(407): n=unknown
cctcgtggtcctcctgccgtcactcgtccccatgttccaatgatgctgatcaactgctttattcagtttcccatctttcttcttgcccagtcatcgtagcctttctttttttaaacacatgatccctagtactcatctttggaggacaaaaggctttccatatgttagaaaaatttgaatctcatagtactcacaacaatgagcagcattgtaagttgtgatgcattcatttggattggaacattctcaatcagtccttccactctaagtaaatatttgtttctcacagaacacaaggcagttcaaagggcctcttgttagagatttataggtgtatgaatggggaacatcatacaagccgtggaaacaaaaatctttccaggttgtcggattttctccttcttggncttataaaaagcaactagacatctttaatttaaaaaata

SEQ ID NO: 1757 - DNA, 476 bp, homo sapiens
cagaattcaccaacaagaacatgctgatgacagtcatttatttgctgtttgctgggacgatgacggtcagcaccacggtcggctataccctcctgctcctgatgaaataccctcatgtccaaaagtgggtacgtgaggagctgaatcgggagctgggggctggccaggcaccaagcctaggggaccgtacccgcctcccttacaccgacgcggttctgcatgaggcgcacggctgctggcgctggtgcccatgggaataccccgcaccctcatgcggaccacccgcttccgagggtacaccctgccccagggcacggaggtcttccccctccttggctccatcctgcatgaccccaacatcttcaagcacccagaagagttcaacccagaccgtttcctggatgcagatggacggttcaggaagcatgaggcgttcctgcccttcttccttagggaagcgtgtctgcttggagaag

SEQ ID NO: 1758 - DNA, 439 bp, homo sapiens
tgtgaatattaattagtttatattactctcattctttgaacatgaactatgcctatgtagtgtctttatttgctcagctggctgagacactgaagaagtcactgaacaaaacctacacacgtaccttcatgtgattcactgccttcctctctctaccagtctatttccactgaacaaaacctacacacataccttcatgtggttcagtgccttcctctctctaccagtctatttccactgaacaaaacctacgcacataccttcatgtggctcagtgccttcctctctctaccagtctatttccattctttcagctgtgtctgacatgtttgtgctctgttccattttaacaactgctcttacttttccagtctgtacagaatgctatttcacttgagcaagatgatgtaatggaaagggtgttggcattggtgtctgg

SEQ ID NO: 1759 - DNA, 134 bp, homo sapiens
  misc_feature (7)..(7): n=unknown
  misc_feature (122)..(122): n=unknown
aaattcntattataaaaccccaaaatgtctattggtctgtttccaggtgtggtagaagaatataaaaagatcaaaattggataaattctattgtaccaatttcgttggtcattttgggccanaaaatttttttg

SEQ ID NO: 1760 - DNA, 353 bp, homo sapiens
  misc_feature (339)..(339): n=unknown
cgttttaatgcatttcaataattatcttcaggacctcggcaaaacctgagtcctgtcctctcgctttcctccccgtacacagcgagcttcaccacttgctccgcaccttctccatcaactactacctgtccctgggatctgtccagtcgcccagctaaagtgctcagcaggtcagcagcgcggcgagcttctatgaggcgtggggtctggggctcctggatctctgtgtcccatttcacagagattgccacctactgccgcctgctagaagatggggaggacttcaatcttggtggtattctggacagcagcaaatacctgtaaagcattccaaaagancaacacccacagga

SEQ ID NO: 1761 - DNA, 442 bp, homo sapiens
  misc_feature (390)..(431): n=unknown
accttgcttctgctggcttagcacctcaagacgtctgtgatgttggtctcagacaccactttgccgtccactatcctgtgggtgttggtcttttggatgctttacaggtatttgctgctgtccagaataccaccaagattgaagtcctccccatcttctagcaggcggcagtaggtggcaatctctgtgaaatgggacacagagatccaggagccccagaccccacgcctcatagaagctcgccgcgctgctgacctgctgagcactttagctgggcgactggacagatcccagggacaggtagtagttgatggagaaggtgcggacaagtggtgaagctcgctgtgtacggggaggaaagcgagaggacaggactcaggttttgccgangtcctgaagataattattgaaatgcattaaaacgcggacgntgggtcgaccc

SEQ ID NO: 1762 - DNA, 454 bp, homo sapiens
gtcatctctcaggagccctttgttcccaagaaagagaagaaatcagttgctgagggcctttctggttctctagttcaggaaccttttcagctggctactgagaagagagccaaagagcggcaggagctggagaagagaatggctgaggtagaagcccagaaagcccagcagttggaggaggccagactacaggaggaagagcagaaaaaagaggagctggccaggctacggagagaactggtgcataaggcaaatccaatacgcaagtaccagggtctggagataaagtcaagtgaccagcctctgactgtgcctgtatctcccaaattctccactcgattccactgctaaactcagctgtgagctgcggataccgcccggcaatgggacctgctcttaacctcaaacctaggaccgtcttgctttgtcattggggcatggagagaacccattt

SEQ ID NO: 1763 - DNA, 485 bp, homo sapiens
  misc_feature (483)..(483): n=unknown
taaaatgcacactgcacggttccctgttgttatcagcaccagtaaggaaagaacgtgccttaacggcagccccacccagagcctgctgcgtggctgctgtgaggctccccatgaatccacgcagtcttcttcctcactggtgcagttggtgaggttttctaccctcacagcaaagggatccttaactataaattcacggtatgcagagaagaggacagaatctgatttactgattgttcctcatttaaaccatgacttaatctctatcttaggatttaactatctttattttctggttaaaatttttaaaaaaagtggggagagggtgagagtcgtaaggggcaatagcaatagagattacactgtgctgacacagagactaaattctagtcagagtgaagacccatataaaaggccggctgatggtttaaaggaagtaactacatggagtctaatcgagacattcatgagttacatctcatnat

SEQ ID NO: 1764 - DNA, 375 bp, homo sapiens
agcgaagatggtgaatattttgcctatggtctgagtgccagtggctcagactgggtgacaatcaagttcatgaaagttgatggtgccaaagagcttccagatgtgcttgaaagagtcaagttcagctgtatggcctggacccatgatgggaagggaatgttctacaactcataccctcaacaggatggaaaaagtgatggcacagagacatctaccaatctccaccaaaagctctactaccatgtcttgggaaccgatcagtcagaagatattttgtgtgctgagtttcctgatgaacctaaatggatgggtggagctgagttatctgatgatggccgctatgtcttgttatcaataagggaaggatgtgattca

SEQ ID NO: 1765 - DNA, 387 bp, homo sapiens
cgcttcaagcccacccgcatcatcttctaccgcgacggtgtctctgaaggccagttccagcaggttctccaccacgagttgctggccatccgtgaggcctgtatcaagctagaaaaagactaccagcccgggatcaccttcatcgtggtgcagaagaggcaccacacccggctcttctgcactgacaagaacgagcgggttgggaaaagtggaaacattccagcaggcacgactgtggacacgaaaatcacccaccccaccgagttcgacttctacctgtgtagtcacgctggcatccaggggacaagcaggccttcgcatatcacgtcctctgggacgacaatcgtttctcctctgatgagctgcagatcctaacctaccagtgtg

SEQ ID NO: 1766 - DNA, 337 bp, homo sapiens
  misc_feature (233)..(233): n=unknown
gcaaagtgtagccacatataatattttgcataatcatactttataactacgaataaacagatggatttatccatctgtttaaaagctaaagcagatgaaagtaattttagtagcacacaaacagactaaatcatttgttctcataactcttgtctaatttgaagacaatgggaaatatttaaaagtgatttcatagagcctgaaaccactttgacatttgagttgagtcacancgaatgttgaaataaatgtcctattccggtaaatttaaaggactgttttaacatgataatttgtctcctaaaataatgtcccaggacccacactaacaaaagtc

SEQ ID NO: 1767 - DNA, 418 bp, homo sapiens
  misc_feature (92)..(92): n=unknown
atccgatttgcagtctggagcagtggctggatttaagttgctctggatccttctgttggccacccttgtggggctgctgctccagcggcttncagctagactgggagtggttactgggctgcatcttgctgaagtatgtcaccgtcagtatcccaaggtcccacgagtcatcctgtggctgatggtggagttggctatcatcggctcagacatgcaagaagtcattggctcagccattgctatcaatcttctgtctgtaggaagaattcctctgtggggtggcgttctcatcaccattgcagatacttttgtatttctcttcttggacaaatatggcttgcggaagctagaagcattttttggctttctcatcactattatggccctcacatttggatatgagtatgttacagtgaaa

SEQ ID NO: 1768 - DNA, 361 bp, homo sapiens
  misc_feature (170)..(346): n=unknown
acggttaaatggttactaaaagctcagttgtaaccactcctaacaccactagcagaacctcaagggagccaagagctcttcccttttcccctgttaatttccagtataatgtagcagcacaattatttcatgtcacatttaagaagaacaagaaccaatttatataaagnacaattgtatatccttaaacattccacataaacacactgtcaaaactcactggntatgctggaattggaggncttaaatttctacatattatttattgcacccagagtactgggtaaaangcactttcngtgaagatcaaatgcnataacgnatnaggggntttttnacactgtgnagtacacacataata

SEQ ID NO: 1769 - DNA, 469 bp, homo sapiens
gccaaaggaagaattgttttaggatatactgaagcagagctgtgcacgagaggctcaggttatcagtttattcatgcagctgatatgctttattgtgccgagtcccatatccgaatgattaagactggagaaagtggcatgatagttttccggcttcttacaaaaaacaaccgatggacttgggtccagtctaatgcacgcctgctttataaaaatggaagaccagattatatcattgtaactcagagaccactaacagatgaggaaggaacagagcatttacgaaaacgaaatacgaattgccttttatgtttaccactggagaagctgtgttgtatgaggcaaccaacccttttcctgcccataatggatcccttaccactaaggactaaaaatgggcactagtggaaaagactctgctaccacatccactctaagcaaggactctctcaatcctagttccctcctg

SEQ ID NO: 1770 - DNA, 353 bp, homo sapiens
  misc_feature (45)..(338): n=unknown
atacaactttgataatgaggatattataaatcatactttaagcanaaatctatgcatgatatatgtaagcagtaacattttgaagaaaaaagccatgnaagcatttacctaaaatttagtaacatcgaaaaacactagtttgtgcatngtaatgttganagcttcataatncactagaatactggnaagtcttcaggtattgtnagnaaaacctggtncnggnaaannctaanattagacacatccatatccttagatgtgcacatcatctnagaantaaatcccagaatgtagcngngcactaagtatccnttgnttgggnacntaacnatacagancaaacgtgtatttgg

SEQ ID NO: 1771 - DNA, 435 bp, homo sapiens
  misc_feature (417)..(417): n=unknown
cacagggggacaggaaaacccatttctcaacccagatccatgtctccactgcttctactctgggttgggattcaggaagacaggcacagtcctctctgttcatagaaacacctgccagtgtcaaggattccagtcaggtgtctatcccaactggtcagggagagaagggcagacccattctcaaagaccaccatgtccaaggtctgacagctccccactggctgcccccacaggggctttaggctggtctgggtcatggggaagcgtccctcttatcgctggtctgtgttctcctggatttggtatctatgttggtacgactcctggccttttatctaaaggactttggcttttgtaaatcacaagccaataatagacttttttctccccctctgttttttgctgtgtcatctctgncttgagactgcttgagac

SEQ ID NO: 1772 - DNA, 349 bp, homo sapiens
  misc_feature (103)..(185): n=unknown
  misc_feature (302)..(302): n=unknown
gaagaaacgctcccctgaaaactgtaaccaaacaaagtttggttaaaacaaagttggttcctttgttttcatggaaatgtcagacaactatgaaaagctaagnnagcatgtnnnnntnaaggtctggctttggtaaattaggcagagatgttctcagcagcaaacaggtaaaatctgacatcgnnaagcattattttaatgtaggaccagttataatcttaaagaactgactaggttctaaaataatagaactgagaaataggactgagaaatgaccaacatcaagtataatacggtacacntagcacttgtttctatagaaaacatttcaaatccagttctttatgat

SEQ ID NO: 1773 - DNA, 464 bp, homo sapiens
  misc_feature (154)..(154): n=unknown
acatttcttaccacttgatttgttttccaagcaagtgctagaatttgctggactgcagaggatcgctgagtggggtactgtgtctcatagacatgcgccacctccacgtgagaacaagggtgaaggtgagggaagcccctcaccttgggtcttntgctgtgcctcctatgtatgtctggtttgctggaagagtgattaatacatctttaatttattaaaaaacaatgtagacctttaaacttcagtcttattggtaataaaagggaacttaattcatacaggtacttgatacagttatacattttccacttacaaaaagaagacaattctgttaaatgaaacctgtatcgtaaaatgtatttttattttacccacgagaatgttgttatttttagcaaatagaactcaatgcagtgcattggttattaccctgtgtaccttgtccctcattttgctgtgacacc

SEQ ID NO: 1774 - DNA, 421 bp, homo sapiens
  misc_feature (138)..(161): n=unknown
  misc_feature (300)..(413): n=unknown
ttacactatcataaattacaaagtattgttcacttcacaaaataaaaccatttccagataattttttgacagtatcaagaagtacataaactacaacaaacaaatctgtacagttgggaggagggataatagcagggnagaggtcaaacctccctgtgccnaatggagtccatctgcatagcccttgggactgtccaggtcaacagtcacacaatgatgctccacgtaaaatagtcattctcttctgctcactccaaagccaagactggtgagtttacacaaatcatctcaatcaaaggnaaagacattgcagttggnttttttaaaaatctagatttacagtttntgatgntttaaatatttcacctatgttacnaaaatatagaaatcttggtgtgaaaggctcatgctangataaata

SEQ ID NO: 1775 - DNA, 326 bp, homo sapiens
  misc_feature (100)..(312): n=unknown
agcgactgaagattgacgctgcccgatcgcctcggaagtcccctggaccatcacagaagccgagcttcgggtaactctcacagtggaggaaggcaggaannnnnnnnnnnnnnnnnnnnnnnnnnnnnnnnnnnnnnnnnnnnnnnnnnnnnnnnnnnnnnnnnnnnnnnnnnnnnnnnnnnnnnnnnnnnnnnnnnnnnnnnnnnnnnnnnnnnnnnnnnnnnnnnnttgtgatttgttcctnnnccaccctaactgatcaatgtactttgtaatctcnccccacccttaagaaggttctttgtaattntncccacccttgagaa

SEQ ID NO: 1776 - DNA, 63 bp, homo sapiens
attctcaagggtggggagaattacaaagaaccttcttaagggtgggggagattacaaagtaca

SEQ ID NO: 1777 - DNA, 437 bp, homo sapiens
  misc_feature (138)..(138): n=unknown
ctcctttacttcatcatgacttgaagactcagaatatcttattggacaatgaatttcatgttaagattgcagattttggtttatcaaagtggcgcatgatgtccctctcacagtcacgaagtagcaaatctgcaccanaaggagggacaattatctatatgccacctgaaaactatgaacctggacaaaaatcaagggccagtatcaagcacgatatatatagctatgcagttatcacatgggaagtgttatccagaaaacagccttttgaagatgtcaccaatcctttgcagataatgtatagtgtgtcacaaggacatcgacctgttattaatgaagaaagtttgccatatgatatacctcaccgagcacgtatgatctctctaatagaaagtggatggggcacaaaatccagatgaaagaccatctttcttaaa

SEQ ID NO: 1778 - DNA, 360 bp, homo sapiens
  misc_feature (341)..(348): n=unknown
atactgcagtgtcatggagggagactaatatttacccaaagaaccttcaataaagctttaatactcacggattttatataaaaaaagtcaaagcaacagagatataaatatccttttatgaaacacatttcttcttgaaaaacagtcacttacatgcttttattttgaagtaaatttccagatggtgatctagaaaccacaagtatttccgggtaaggctgaagacccatttgtttgttatctttcaatttttgtactataactttggcaaattcttctccttggatgtcagtagtgtctagtaattgtctgacttttgaggtccttgtaggcttggtacnnacangntcatagtcctct

SEQ ID NO: 1779 - DNA, 352 bp, homo sapiens
  misc_feature (321)..(321): n=unknown
atcagggagacagggcaaaggtttcacccttcagttcagtccccaatccctgcttattatttccctaacagaagaccatcccccttgccactccctggtttttcttctctggcagcaatgaagcagctgctgacccagctctagttttcgggaagtcagatgaccttttccctcccgcggctctctacctctcgccgcccctagggaggacaccatgggcccactgatggttcttttttgcctgctgttcctgtacccaggtctggcagactcggctccctcctgccctcagaacgtgaatatctcgggtggcacttcacnctcagccatggctgggctcctgggagccttc

SEQ ID NO: 1780 - DNA, 416 bp, homo sapiens
  misc_feature (347)..(395): n=unknown
aaattccatgtgaaagtgaaacaagcatgagtcaagtcaaccagggaaggaatctggggacaggccaaggagcgggaggtggggcagcgaggcagtcctgctggtaggagccctgaggatttcccagcttgtgtgcgctgcctctggcatcctagagacccggatttactcagctaggagagaggatggatcacagggtctaagggtggccattcagaggtagaagatggaggggcggcagattctggcagggcagcagagggctcagtggccatggctagaggggtaaaaaattcaggacatcccccaggtgctgcctcagccagggctgcatgcggaagagattnatgtgaaagtctcgtggcggcgggaccttnctacgagggggccttttncgggagtttttgtcagcagag

SEQ ID NO: 1781 - DNA, 480 bp, homo sapiens
  misc_feature (375)..(455): n=unknown
aggaagagccccacggccagctccttcctgttcccctggcggcccctcgcttcttccttctggatgggggcccagggggcccaggagagtataaaggcgatgtggagggtgcccggcacaaccagacgcccagtcacaggcgagagccctgggatgcaccggccagaggccatgctgctgctgctcacgcttgccctcctggggggccccacctgggcagggaagatgtatggccctggaggaggcaagtatttcagcaccactgaagactacgaccatgaaatcacagggctgcgggtgtctgtaggtcttctcctggtgaaaagtgtccaggtgaaattggagactcctgggacgtgaaactgggagccttangtggggatacccaggaagtcaccctgcagccaaggcgaatacatcacaaaaagtctttgtcgccttccaagtttcctccnggggtatggtcatgtacaccagcaa

SEQ ID NO: 1782 - DNA, 332 bp, homo sapiens
  misc_feature (250)..(324): n=unknown
cgtcccgactcagttactccagtaccatcagccaccaccacacagatggcctcagctcggatggccccataccccaccctagcgacccacgggtgagtttgctgagtatgtgagattaactggtggctcagtggtcggctcctctagtggataattccattcaaagccaatgctcttgatgccaaggagttgatactggccatagatgcccaccagcacctgcccctcttggctggggtaggcagagganntctggccatcaagcttcccaaaatagaaatagnggnccttgctggtgtacatgaccataccccggnggaaannttggaagg

SEQ ID NO: 1783 - DNA, 468 bp, homo sapiens
  misc_feature (448)..(448): n=unknown
caggaagacagagaaagcagcacacacaaaggatcgcctcctttcctaccccattactctcagctcctgaaaataaaccctgtgctaactggctcctgctgtactggctttcagcagaggaaatggccctgagcctcacccgagcagtggcgggcggggatgaacaggtggcaatgaagtgtgccatctggctggcagagcaacgggtgcccctgagtgtgcaatgaagcctgaggtctccccaacgcaggacatcaggtgaggagtgcatggctggcctgaacccaagggacagcaggacaggatattcttgcctgtagaacagttcttcctaatggcacgttctggcttcaggaggcctggcttctaaccctagttatgtcattaatcaaactgtgaaatacagagcagtcatttcactctcagtgtgtctcattttaaaaatcanaccgtaacagtagtatctca

SEQ ID NO: 1784 - DNA, 470 bp, homo sapiens
  misc_feature (448)..(448): n=unknown
caggaagacagagaaagcagcacacacaaaggatcgcctcctttcctaccccattactctcagctcctgaaaataaaccctgtgctaactggctcctgctgtactggctttcagcagaggaaatggccctgagcctcacccgagcagtggcgggcggggatgaacaggtggcaatgaagtgtgccatctggctggcagagcaacgggtgcccctgagtgtgcaatgaagcctgaggtctccccaacgcaggacatcaggtgaggagtgcatggctggcctgaacccaagggacagcaggacaggatattcttgcctgtagaacagttcttcctaatggcacgttctggcttcaggagggctggcttctaaccctagttatgtcattaatcaactgtgaaatacagagcaggtcacttcactctcagtgtgtctcattttaaaaatcanaccgtaacagtagtatctcata

SEQ ID NO: 1785 - DNA, 468 bp, homo sapiens
ggttgcagccggagccgcccagctcaccgagagcctagttccggccagggtcgccccggcaaccacgagcccagccaatcagcgccccggactgcaccagagccatggtcggcagaagagcactgatcgtactggctcactcagagaggacgtccttcaactatgccatgaaggaagctgctgcagcggctttgaagaagaaaggatgggaggtggtggagtcggacctctatgccatgaacttcaatcccatcatttccagaaaggacatcacaggtaaactgaaggaccctgcgaactttcagtatcctgccgagtctgttctggcttataaagaaggccatctgagcccagatattgtggctgaacaaaagaagctggaagccgcagaccttgtgatattccagttccccctgcagtggtttggagtccctgccattctgaaaggctggtttgagcgagtgttca

SEQ ID NO: 1786 - DNA, 356 bp, homo sapiens
  misc_feature (273)..(353): n=unknown
acacaaatcttaaaaactaaagcaagtcagggaagcctggaaagatacccagatttgataacatgttagaaggaaatccaggctaaggaatctcattttctagctttgatctggttgtcagttgggatggacttgcccaagtgatggcccacagaaaggccaaatttcttgtttttctcctcatcctgtacctcttttttcattaagaatcctgcctggaagtttaggtcaaagaggctgcttggagcaaaatacagtggtgtctcatcccanatattctccaggcgtttcttccatccttccaggatttgaattcgggcgtctgctggagtgtgcccaatgcnatatgtcanttg

SEQ ID NO: 1787 - DNA, 399 bp, homo sapiens
  misc_feature (290)..(309): n=unknown
gggggcctctctagcttgcggcctgtgtctatggtcgggccctctgcgtccagctgctccggaccgagctcgggtgtatggggccgtaggaaccggctccggggccccgataacgggccgcccccacagcaccccgggctggcgtgagggtctcccttgatctgagaatggctacctctcgatatgagccagtggctgaaattggtgtcggtgcctatgggacagtgtacaaggcccgtgatccccacagtggccactttgtggcctcaagagtgtgagagtccccaatnnnnnnnnnnnnnnnnnnnnccttcccatcagcacagttcgtgaggtggctttactgaggcgactggaggcttttgagcatcccaatgttgtccggctgatggacgtctg

SEQ ID NO: 1788 - DNA, 450 bp, homo sapiens
aaaggtagggaaagggacaagagggaacataccccttagtgtagagaaatgggaaggagaaggagaagcctcaaaaggagaggtgggaggggaatgtcattaaggcagcaaagtaatctctgtagaaagatggaggaggaccctccatagcctcagagataaaggcaaagattgccctctcagtgtccagaagggaaatggcagcttttcttccttccatggcagccactccattgctcactccggattaccttcatccttatgtagataagagtgctgcagagctcgaaaggcagagattcgcttgtgtgggttaaaagtcagcatttccagcagcagctgtgctcccgactcctccatctcaggtaccaccgactgcactgggcggggccctctggggggaaaggctccacggggcagggatacatctcgaggccagtcatcctctgg

SEQ ID NO: 1789 - DNA, 394 bp, homo sapiens
  misc_feature (284)..(371): n=unknown
gcagaggataaacaactggaaggagagcaagcacaaagtcatcatggcttcagcgtctgctcgtggaaaccaagataaagatgcccattttccaccaccaagcaagcagagcctgttgttttgtccaaaatcaaaactgcacatccacagagcagagatctcaaagattatgcgagaatgtcaggaagaaagtttctggaagagagctctgcctttttctcttgtaagcatgcttgtcacccagggactagtctaccaaggttatttggcagctaattctaganttggntcantgcccaaagttgcacttgntggnctcttgggntttgggctttgaaaggtatcatacataggagtatgccagantaaanttccatttttttgaagatcagct

SEQ ID NO: 1790 - DNA, 455 bp, homo sapiens
  misc_feature (317)..(336): n=unknown
  misc_feature (455)..(455): n=unknown
gtgtacaaattcagaggtttaaaaaacttcgaaagtcacagacacagaatttaggaagctgaaggctgagagtctcccttctcacttaatccatgctttattttgcattcctcacaggtaaggaggcagtgcctgttatgctgtggaccaaaaccagccccacggagctgatcttcaaaaaaatggaatttactctggcatactcctatgtatgatacctttccaaggccaaatcccaagagaccagcaagtgcaactttgggcaatgatccaaatctagaattagctgccaaataaccttggtagactagtccctnggtgacaagcatgcttacnagagaaaaaggcagagctctcttccagaaactttcttcctgacattctcgcataatctttgagatctctgctctgtggatgtgcagttttgattttggacaaaacaacaggctctgttn

SEQ ID NO: 1791 - DNA, 231 bp, homo sapiens
  misc_feature (15)..(15): n=unknown
gattctgttaatatnggaaggaagagagagtggttcaaagtagaagatgctatcaaagttctccagtgtcataaacctgtacatgcagagtatctggaaaagctaaagctgggttgttccccagccaatggaaattctacagtcccttcccttccggataataatgccttgtttgtaaccgctgcacagacctctgggttgccatctagtgtaagatagagagaactgggt

SEQ ID NO: 1792 - DNA, 457 bp, homo sapiens
  misc_feature (368)..(457): n=unknown
ttcccaccacagatggatttgctgaatatgctaatgctgtgaatgagaaaacaattttggggtaggtatacccacaagtaatctgatgacaaaataaaccacagactgatgtcaaatggacaaaaaactgaaaatatgctgtgagaaatagacaaccaaaataatatagggggttgtggggtgtggcacagttaaggcatctaaacaaaaattccacatggctttggcttattaaaatattttacactatttttttaaaaaaagatttgaaagcatctgaaaaacatgcaaattgtttgaaaaccttgcatggcaaattcagacagtttgcaagcgtcaatcagatgtttgacgaggaaacgaaagangcctctccccatgagactgcacatggtgggagangctacccagttctctccaacntacactagatngcaacccagaggtctgtgcagcn

SEQ ID NO: 1793 - DNA, 525 bp, homo sapiens
  misc_feature (501)..(501): n=unknown
tgcggtcgttccctcggctgtggaccgggcggcacgcacgcggtgcagggtaacatggcggatgcggaagtaattattttgccaaagaaacataagaagaaaaaggagcggaagtcattgccagaagaagatgtagccgaaatacaacacgctaaagaattttgataagctgaatgtaaggacaacacactatacacctcttgcatgtggttcaaatcctctgaagagagagattggggactatatcaggacaggtttcattaatcttgacaagccctctaacccctcttcccatgaggtggtagcctggattcgacggatacttcgggtggagaagacagggcacagtggtactctggatcccaaggtgactggttgtttaatcgtgtgcatagaacgagccactcgcttggtgaagtcacaacagagtgcaggcaaagagtatgtggggattgtccggctgcacaatgctattgaaggggggacccagctttctagggncctagaaactctgacaggtgcctt

SEQ ID NO: 1794 - DNA, 555 bp, homo sapiens
  misc_feature (470)..(546): n=unknown
tcactttcactctcactctctcgcttccgcttcgcagtttttgctgcttcggcaactacctgcggggcttttaccacttcagcaaccacctcttttttggcagactcactgtagtcaacatactcctgcttccaggtggcaggtgtgctgtctgtgggcttcccatgcttgtccagaaggccctgcttgatcatcagcttcttctgacttgcctttggacctaaaccccacttccgagggtaagtgtctctctccatgatcactctcttgatcttggctactataccatggtcgcaggtagagatgaccgctgtggtcattaatgcaatagccatgcagattgcttctcctttggtggtgataaccacaatctcctgattgacctcaatgccgtcctcatatcgaagaacacctggaagcataatcttggccccatagcagatggcatttactgcactgtctttcataancagcccgtttatgagatgtcaacagcttttccaaagggtaaacaactcgccgcaggtaactctcatccttgtgggnatcatacag

SEQ ID NO: 1795 - DNA, 270 bp, homo sapiens
taatgctttatttttccccagctgctttttaagattttctccttgtctttggttctcatcagtttaattatgatgtatatggacatggatttctttcggttatccttatcagagttcacagagccacttgattgtgtttcagatatctgggaagttctcagctatgatttcttcaagtattggtttctgtaccatactgtcctgtacttctgtggcattgataacatgaatgttagagcctttgacattggccggggaattcctgagact

SEQ ID NO: 1796 - DNA, 448 bp, homo sapiens
  misc_feature (156)..(156): n=unknown
  misc_feature (376)..(435): n=unknown
aaactctgacaaagcggaatcctttcatctgtccaaagcatctgcaatctgaaaagtagaagaggggaatctccgttgccttttttctctcttcatcctgtcacctggcccaagagtacacccgccatggagggtgcgtaacaagcagggagactnaaggacccaatttctagctaaagggtcaggaaaatgaggggtcttgaaagctggagaatgtggacaggagagagcttgtgaaatagatcccataaagttgcacatgaatttgtaggttcacatgcatggacctgaccctaagcagtattccagtgaatgagaactgaactattaggcagaacaccccaggtttcagactgctcactggggggcataagcntaggactgttctgatttacatggcaaaggctttgaaactgaactgatcggctgggcgcngtggctcacgctg

SEQ ID NO: 1797 - DNA, 515 bp, homo sapiens
  misc_feature (34)..(34): n=unknown
  misc_feature (436)..(436): n=unknown
tggtaactgagctgcaatagaaatttcgggaganaataagaaatatgaaagactgtactacagattctaggaaaggtaagaggaaaggagcctcttcatcatgttttgtagaataaatgttaccattgttcatttaaaacctagatagagaaatcatgtgccagatgtcataatctgtatggttctttcctgtgattactgataaaaatgttatggaatgcatttgggcaggagtaagttaatgaaaagaatttgggaatactgaacttggtataaaaaatatgtattatagatgtctcactaggtatgtttaacagttcctaccctaacatacctgtgctctcacaataagaaactcagctatttcaggtatccctgagattatagttggaagttcggtatgggaaagtttagtaacaagttgactcagattttntcctccggctcttgcttttaatgcatatgtgtgctcctcattctttttaggccaaagcccagttccaagttcataatcc

SEQ ID NO: 1798 - DNA, 375 bp, homo sapiens
ttttaaggcatggagctgagaagtctgggagtgaggagatcccagtccggctaagcttggtggagcattttcccattgagagccttccatgggaactcaatgttcccattgtaagtacaggaaacaagccccgtacttaccaaggagaaagaggagagacagcagtgctgggagattctcaaatagaaacccgtggacgctccaatgggcttgtcatgatatcaggctaggctttcctgctcatttttcaaagacgtccagatttgagggtactctgactgcaacatctatcaccccattgatcgccaggattgatttggttgatctgggtgagcaggcgggtgtccccgtcctccctcactgccccatatgtgt

SEQ ID NO: 1799 - DNA, 376 bp, homo sapiens
  misc_feature (174)..(174): n=unknown
  misc_feature (328)..(368): n=unknown
tttgtttacaataggcactctctctaccccacctctcagtacttgagacttaaagtgctacaggcagctggatctgtttgcatgcaggatgaagagggttaaaacactgtttatataagatccaatctctcaccatctctaaagcagccgttggcctgtcatcagtgagatacnatccagtcttctcatgcacgggaacacacacaccctgcgtttctcccttccaggctaggaacctctctgccaccaagggctgccatccatcgcctagtaaccacggcaacccaacctactctaaaaccaaaccaaaaaaataaaataacacatnctctttgcatgacacattttttttctcccctttttggtanactttttt

SEQ ID NO: 1800 - DNA, 574 bp, homo sapiens
  misc_feature (507)..(552): n=unknown
ctgaagcaacgctgccatccaaggggctcctggggagcttgacggtccatcggtttgtagtttgtctagagtcacccttgcaatgacattcacatgtggaagatacggataactctgttgtttgcaggccaagtgaatttgaaatctccaggtagtacttccccatccaagacagtcttccacaagatccagcctcttttcaccagcaaattccctttttcagagggtactcatcccaccctccaaccttgggtttcttcctgaatcacaatggcctatattagtctcaagccttgaaagactgagaaataattccctttttcagagtggcagtgaacatagatgtgcttttaaactataggccatacggttagcctaggaattaaccttgaaaaccaccacagcaccagtgttcagcagcccagagtagggcaaaggggctggccagtggtggggtagaggcaggcaaaggttggagcagagtgggtgaatgggaggacatggggnaaccagtcagatggcatcanccatttggaggcagcatcttanccnttaaaaaacaacatcagttgca

SEQ ID NO: 1801 - DNA, 317 bp, homo sapiens
  misc_feature (163)..(169): n=unknown
caccactgacctggaccccaacaaaaagctgattgtctttttaaaagttattattttgccctgagcaaattgcattttaattggggcagttagaatgttgatttcctaacagcattgtgaagttgaccattgtgaagtttctgtccctttagaagagattatnggtgangaagggaggggcctgagagattatagtgagaaaacttgcgagaattttgttttccacccttatttgctgctctttcacttgggcactgactgtaggatatgttcccttgcatggatgtttttaacaataaaaggactgacttgaaaaa

SEQ ID NO: 1802 - DNA, 273 bp, homo sapiens
  misc_feature (271)..(271): n=unknown
ggaacatatcctacagtcagtgcccaagtgaaagagcagcaaataagggtggaaaacaaaattctcgcaagttttctcactataatctctcaggcccctcccttcttcacccataatctcttctaaagggacagaaacttcacaatggtcaacttcacaatgctgttaggaaatcaacattctaactgccccaattaaaatgcaatttgctcagggcaaaataataacttttaaaaagacaatcagctttttgttggggtccaggtcagtngt

SEQ ID NO: 1803 - DNA, 480 bp, homo sapiens
  misc_feature (373)..(456): n=unknown
ctgaaaacgaaacggcgctccagcagattgggtggaaagagctgggtctcttttctctgtttttcacgctagaaagggcttgtaaacattgttccttttaaaatgacctaccccaggcatttgtttgggcacacttctgtcctggggtcatcgttcctaggtggcttcggacctgggacttttcctgtatctgcacattgtcgttttatacacaattgccaaggtgggactgctttcaactttactgtgcttgaagctgcaaagcggatcctgttacagtgcaaagaagaaatggcaaacggataacagctactgtgcctagaagatggttctgccctgatgtttcctggaataatgctgaggactgcctttngggtagccgccctattcagttcacttcatctcggaaatacctgacccctgccttggatccagcggccctcctgagaagctganggaaggagggaaatcctaatgtgt

SEQ ID NO: 1804 - DNA, 570 bp, homo sapiens
tccatactgattcttctgggtactctggtgagccactcaaaaaacaatttctgccaaacctttgggaaagtatcagtggtttggtggccaaattcctcatcaaatagtgcaaactggtttcctccaagctgtgacttctgcagagacagaaatgtccttgttaagtaacactgtcctcaaattttctatgtgtatcatagcctacttcctcctgaatactacctttctccaaatcaagactcaaaataatatgttttctttttaatttctatcctaaatcccatatagaaggaaggatgcaagacgtggtctccatgggagacagagtataatcaccaactaggtccaaaagaaaagcaaagtcgtgtcctgggttcctttttccaagttccgagttgtgggaagatgggttgtggcagctccgggagcagacacataggatttcctccttcctcagctctcaggagggccgctggatccaaggcaggggtcaggtatttccgagatgaagtgaactgaatagggcggctacccgaaaggcagtcctcagcattattccaggaaacatca

SEQ ID NO: 1805 - DNA, 282 bp, homo sapiens
aagtaaacccagctttgatttattttaatctctacagttggattatggtgatccagtttatgagaatgaaaattttctcttgatgtcttgatggagataacacaatttgatgcctctatttattcataaaagttgacaattagttaaaaaaaaaaggcacatacctatgaaaaccagataagattatgcaaacgtaagataaataatggagaatagaaatagacccatagataatccaaataatgaagccattaaatatcaattttaaaatgttatgtttaa

SEQ ID NO: 1806 - DNA, 283 bp, homo sapiens
tgattaaacataacattttaaaattgatatttaatggcttcattatttggattatctatgggtctatttctattctccattatttatcttacgtttgcataatcttatctggttttcataggtatgtgcctttttttttaactaattgtcaacttttatgaataaatagaggcatcaaattgtgttatctccatcaagacatcaagagaaaattttcattctcataaactggatcaccataatccaactgtagagattaaaataaatccaagctgggtttact

SEQ ID NO: 1807 - DNA, 255 bp, homo sapiens
  misc_feature (121)..(127): n=unknown
ggcctgatttggtccatgggcatagtttgacaaacagtggtttgaacaaatggacctagggacttcagcagtaatccagtcctgaactaagcaatactataccatttttttgtatagcttntatatntatacatgaagtgcaataccacataacgttagctctgatctagtctgcctggctgtaagtcctggcatctcctggttattgacagtgtgacattgggcaaattaacttctctttgcgtcagtttttta

SEQ ID NO: 1808 - DNA, 460 bp, homo sapiens
  misc_feature (446)..(446): n=unknown
gatgcatcaccagtatattacaacagagccattaatcttgtagcttcatcaacattaactggtttgctttcatgacgctgctgaggaatcagttctttctgcagaggttcaagtgaaatgctttttgcgaaatgtgcaagttccttttgtacatttacaaaagctttatttactctgttaactttttcctcattcataatgtttatcttcttaagattagtggtaactggttttgctttgtttttagccttaaagtttttttggctggctatgtgaaatacattcctggacttcggccctcttaatttgttcttggccattgtctagaaaagaaaataaattcaattaaattgcccacatttatgaaccgtaagtcaattttaagttttaaaggtaccaattaaatctaaaaaattctatcttactcttgatatttttaaagtggngcatatatatttcc

SEQ ID NO: 1809 - DNA, 279 bp, homo sapiens
cacgaatgctgaaatttccgctcgtgtgagaatttcaagtttgcacctgtctctgtctgaattttctaatgtatgccagaatggaaacatcagatgtaggaattttatcggtcaatttcttaccctgttgtttcagtattttttgcatctcacttctcctggcactattactagaagagaatagtagaattcaggagggacctgacatctgtgttaccctctttcaaaacccttttatcgacattatttcatttggcctgtgcagcttccctataaggc

SEQ ID NO: 1810 - DNA, 597 bp, homo sapiens
  misc_feature (231)..(583): n=unknown
cacattatacattttttggatagcgctggttttgaatgtagacaccatcacagcagtgactgtctttcctgctctaactgagcacccaacacagggccttgagaatataatagatgctccataaataaccatcagatgaacagttggctctgatatctacataaggcaataaccaggccttggactacaagacaggaggccctcaccctgatcctagccctaatggaaaancnnnnnnnnnnnnnnnnnnnnnnnnnnnnnnnnnnnnnnnnnnnnnnnnnnnnnnnnnnnnnnnnnnnnnnnnnnnnnnnnntgccttatagggaagctgcacaggccaaatnaaataatgtcnataaaagggttttnaaagagggtaacacagatgtcaggtccctcctgaattctactattctcttctagtaatagtgccangagaantgagatgcaaaaaatactganncaacagggtaagaaattgancgatnaaattcctacatctgatgtttccattctggcatacattagaanattcagacagagacaggtgccaacttgaaantctcacacgagcnggaatttnagcattcgtgacga

SEQ ID NO: 1811 - DNA, 400 bp, homo sapiens
ctaatgcttacatgttccagccccactcccggctcacactcttaggcagaaattcattgctcctgtaaattaagtaataattaataccgctaatgagaaatctgggagtacaggaggtgattttaaaaaatgctcgtatttcctttgattagagtagcaattgttagggatacatgagccagatttggttttatgtaaaaaaaatctttcagttgatgagttcttgtttaaattgtattgctgtggcaatttcttattgtaataatatgtaggagaatttctaatttgaatccctttatttacagaaagctcactgtaaatttgtaggaatgtcatggtactaccccattaagttatttttattagtgtttagttattgattcagcagtctctaattgtg

SEQ ID NO: 1812 - DNA, 347 bp, homo sapiens
  misc_feature (207)..(227): n=unknown
tggtgacgacatcgttagaagatacgcccatgtccaatatctgcaacagaagctcaatagaagttaaagaaaccatactaaaagactaaagacaaaaattgtatgacattacttacccttaattctgtggacaataaaacaattaacactatgtttaaaattgaggtttcatcacaaggtgaaatagtggcaagttaattatcaaannnnnnnnnnnnnnnnnnnnnccatcttttcctttccatgtagaagtgggcaacctcttcaaaggtatagtggccaccaactatcatcatctgagggtatttatacgagcagagaaggggtaaattgcaaaggagtagtgc

SEQ ID NO: 1813 - DNA, 369 bp, homo sapiens
aaatatcatagaacatttaagaaagtttagtataaataatattttgtgtgttttaatccctttgaagggatctatccaaagaaaatattttacactgagctccttcctacacgtctcagtaacagatcctgtgttagtctttgaaaatagctcattttttaaatgtcagtgagtagatgtagcatacatatgatgtataatgacgtgtattatgttaacaatgtctgcagattttgtaggaatacaaaacatggccttttttataagcaaaacgggccaatgactagaataacacatagggcaatctgtgaatatgtattataagcagcattccagaaaagtagttggtgaaataattttcaagtccaa

SEQ ID NO: 1814 - DNA, 567 bp, homo sapiens
taatacatatggttcaaaatgtataatacatcaagtagtacagttttaaaattttatgcttaaaacaagttttgtgtaaaaaatgcagatacattttacatggcaaatcaatttttaagtcatcctaaagattgatttttttttgaaatttaaaaacacatttaatttcaatttctctcttatataacctttattactatagcatggtttccactacagtttaacaatgcagcaaaattcccatttcacggtaaattgggttttaagcggcaaggttaaaatgctttgaggatcctgaatacacctttgaacttcaaatgaaggttatggttgttaatttaaccctcatgcataagcagaggcacaagttagctgcatgtgctctagactgtagagcgagccaccgttgagaagcaaaggacagcagcaggaagagcaatggaacctcctcaggacttaccaggctgctgcacaggatctagcttctcccacctaagatgggcacattgaaagccttgttgcagcagcacccccatctgtggaagcacaggctgcctgcacttctcc

SEQ ID NO: 1815 - DNA, 384 bp, homo sapiens
  misc_feature (188)..(188): n=unknown
gaaattgataaatctgaatttgatggggtgaccacaaattcgaaacacaaatcaggcaatgcaaagaaacaagtttccaagagaaaaacttcagataaaaagggaagatatcagaaggaatgtcctcagcattctcctcttgaagatattaaacagcggaaagtattagacctcagacgatggtactncataagccgaccacagtataagacttcttgtggcatctcttcattaatttcttgttggaatttcttatacagcacaatgggagctggaaaccttccacctattacccaagaagaagctttacatattctgggtttcaacctccatttgaagatattaggtttggtctttcacggggatacaacacttatgaggtgg

SEQ ID NO: 1816 - DNA, 215 bp, homo sapiens
  misc_feature (16)..(206): n=unknown
tttctgtccagattanacactcntaacttgaaaggacaanaatctgtgcntatctgcttatntatctgcaatcacccaccanaatcanatacaagcttantatctggnganctacaaggttatttttnntnccanangatcnnctcctatttaatgnaggcttactacaanctnctactgtnttnatacngtcctgtatntagcantttcatata

SEQ ID NO: 1817 - DNA, 251 bp, homo sapiens
  misc_feature (79)..(152): n=unknown
caggaggacaccgggaagacccttcactctcatggggagagactgtccaggtgggactgtggaagagcgcataggtatnngagaggagaganatggcgctggtcaganctacctacccccacgaccttgtngggcacctcaggccctgaccnacctgggctcttctgcctacccttttctattgttgctggaaggaacaagcaaagtctcaggtttctgggcacagatgctccagtgagagctcaggggaa

SEQ ID NO: 1818 - DNA, 577 bp, homo sapiens
  misc_feature (96)..(96): n=unknown
  misc_feature (275)..(553): n=unknown
aagcattttacaaacaaatacaattggggaacactgatcagacaaggctcaacaggccgctggattccaggagttctcagagccttcagctctctnggaggagaggccacgacgcacagactctcctgagggtaatgaactaggacgctttttttaaaatctctttgaccccattgtccctgggccacacatggggaaaggtgaccctaggccccttgaaaactaacccagttggaggagggcaacaggaactctatgcagaagaggtgtgtgtngntgnanannngggnncnttgggcagcaggcgggggcagtntcctganttcccctganctctcactggagcatctgtgcccaganacctgagactttgctgttccttccagcaacaataganaagggtaggcagaagaggccaggtggtcaggggtgaggtgccccacaaggtcgtgggggtaggtagttctgaccagcgncatctctctnctctcccctacctatgngctcttncacagtcccacctggncagtctctccccatgagagtgaagggncttcccggtgtcctcctggtggtg

SEQ ID NO: 1819 - DNA, 248 bp, homo sapiens
  misc_feature (169)..(234): n=unknown
gaagagtggaagaaaatctccactatcaatgaacccagactcttgtcttcttcaagagcaagggcctccggagatccaaactgtgattgaaccaagtgcagactcctaatgctcttgaaatacacagcccctcctaggagcttaccattttcaccttccttgcctatgnccttgcnttctagttccaaatattttagccagcttcactgtggaatagtctttcagnnaaaaganttcttgctgttatt

SEQ ID NO: 1820 - DNA, 459 bp, homo sapiens
  misc_feature (116)..(153): n=unknown
  misc_feature (298)..(298): n=unknown
ccacattaaggagttaagaacataatgcaaaaaatgggaaagggctatatacaggtactttgccaccatcattgttgtgtgtttgctcttgtgttcttccttttctgctgccaggngaaaggagaggggacaggataaagagaaacacanggnggaagggaaagaacaagcactcctgagccctaggcagacgtggacagacagaagggcaccagcaggcgttgcaacatgcccagggcacccaccaagggcagctcttttacaccttctgcaaaaaggaggggacctggagggcgcnataatgaatggatttgattgtagaaaagggggcgaggttaaaaagaaaatggggtgagatgaagattccatcagaaaacttagctgtacagagaaaacatcaaggctttggtggagatatcagattccaatcttttcccagattttgggatcagttcaggg

SEQ ID NO: 1821 - DNA, 509 bp, homo sapiens
  misc_feature (494)..(494): n=unknown
tgtgtccagtgcggctggagagcaggatgggtggtgcaatgcccagggtgcaagcatactccatgaggcccagtctgtgaacagagaccaggtctaaccccttcttccaggaaagcctcgtagggccttctggccaagaggccacgagtggtgaagactgcagactctgaaatcagaaatacctgggctccactgtcagcatggcagctgaggaagagtgaaaattcctctaagttcttttagaagtcccagcctccccatgtaactggggaactgatgggaggagcagagctgtctgtgcacataagaagttctcagtaaatggagacagttactatttctgttattattgaatttgaacaaattccctgggtatgtgtggggggacacttcaggtgaaaacacgcccctcctcccctggtgcgggggctgtgctgccacctctggaagcctgcagaggggcagggaaaacagacctgaacaaaagtgtgcanccagtgaggaggtgc

SEQ ID NO: 1822 - DNA, 400 bp, homo sapiens
cccaatcacactgtttgcgaaaagacaattacagtaccaaaggggaaaagactgattctgaggttgggagatttggatatcgaatcccagacctgtgcttctgactatcttctcttcaccagctcttcagatcaatatggtccatactgtggaagtatgactgttcccaaagaactcttgttgaacacaagtgaagtaaccgtccgctttgagagtggatcccacatttctggccggggttttttgctgacctatgcgagcagcgaccatccagatttaataacatgtttggaacgagctagccattatttgaagacagaatacagcaaattctgcccagctggttgtagagacgtagcaggagacatttctgggaatatggtagatggatatagagata

SEQ ID NO: 1823 - DNA, 596 bp, homo sapiens
  misc_feature (426)..(442): n=unknown
acaaggagcaccaatggaatagccaccgttgtaatgtttattcctgtggatgtttcttccgaggggatgggccttgtgattgtctcatcttctttcttagttgaaacactggtgctttgacttgtcttgcgccacaccaatgaatcattaccttgtgtaatctggcaaccaatgagctccaccttcaaggctatcctctggtgccatgtctgggggacaacccgcacatatctggccacgatgggagggatgaaattgttttgcactgggtcccgaaagttagagttaccctgaaacaccttttcttcattattcacaattcctttataggtcttccacttagaattattgtttttgaagttcatcacaaaactcttaacataaaagttgaagttcgactgtgtagatcctgtgggtcctaatgtnctgttattttcttttnctcccccaaatcgatctccagccactctcgtggtttgtggttgttgctactgtcgcccgaagcccatgatgggccttggtcctgaagtcgggcttggccaggagaccagtgaacttggtctccaactctcattgaaccgactgccatgaggaag

SEQ ID NO: 1824 - DNA, 368 bp, homo sapiens
caagcaggaggttccaaaaagcactcaaaccatctcagaaaattggtgtttgatgatttttgtgattcttcaaatgtttctaataaagattcttcagaagatgatataagtagaagtgaaaatgaaaagaaatcagaatgtttttcttccccaaagacaggattttgggactgttgttccacaagctatgcccaaaacttagattttgaaagttcagaggggaacacgatagcaaattctgttggagaaatatcttcaaaattgagtgagaaatcaggcttatgtttatccaaaaggttgaattctattcgctcttttgaaatgaaccggacaagaacatccagtgaagcatcgatggatgctggctt

SEQ ID NO: 1825 - DNA, 568 bp, homo sapiens
  misc_feature (525)..(525): n=unknown
tgcagtattaatgtaaaacagtacaatattaatgtaaaatgttcagtgcacattaaacagcatacatacccatttttaaagacctatataggcataccaaatacgcttagaacaatacactttttcagagcctaaattaaaaattgtgcttacctcttacctatcttcaccccctcaacactcttcacagaaaagttttgtcctacataaaagatattctatcagccaactgaaacctctttttcttaagtatggaaaacacagcaagcaaaaatgctaccatgcatagtttccacaaagaacaggaacatgcaaacaagaaacatactactcaaaagaaaactcccctggaatgcaagtggatcaagaacttggcgatgagctctttcaaacctgttacatctggaacaatgaagctatgatgtttaggttcctctaaacccaagtgctccatgccttctttccatagtatgctaatttctgatttacacacatacacacacacgcagaggagaaatgtagctnctaacataaacaatgtcttcatatgaaaatgtttctttctact

SEQ ID NO: 1826 - DNA, 424 bp, homo sapiens
ctgttggctgtgttgtggcatgagtttgcatgactttctggaggcatggagttaggtaaggctacatgagaaattgagcttttccactgggttttgaaagaagagtatgatgtgaacaagtaaagactgaatggggctgagatgaaggcaatgtttccaaggaaaggaaatgttatgagcaagagtgtgaggcaagagaagctggaaccacattcagagagtatcctgtagattgctccacctagaatctcaggtgggtggagcagtggtgggagaagactggaaaggtaagttgaaggtaaggaatgtgtggtgggcctcagatcccaggctcattcctcaaatcacttcttacttccctcacttatctttgtttaaataaggttagtacattcactaggggcaaatgggttttctaataaat

SEQ ID NO: 1827 - DNA, 444 bp, homo sapiens
gaaaaatggtcgctacagcatctctcggacggaggccgctgacctctgcaaggctttcaatagcaccttgcccacaatggcccagatggagaaagctctgagcatcggatttgagacctgcaggtatgggttcatagaagggcacgtggtgattccccggatccaccccaactccatctgtgcagcaaacaacacaggggtgtacatcctcacatccaacacctcccagtatgacacatattgcttcaatgcttcagctccacctgaagaagattgtacatcagtcacagacctgcccaatgcctttgatggaccaattaccataactattgttaaccgtgatggcaccgctatgtccagaaaggagaatacagaacgaatcctgaagacatctaccccagcaaccctactgatgatgacgtgagcagcggctcctccagtgaa

SEQ ID NO: 1828 - DNA, 128 bp, homo sapiens
  misc_feature (26)..(128): n=unknown
agtagcacattgcatctgttaagtgncccagctcacctgtaatngttatgnttcnancggttgttncattccaagatnatggtgtangngttacaccccnnatnttcatntcnacattctgcaggttn

SEQ ID NO: 1829 - DNA, 188 bp, homo sapiens
  misc_feature (23)..(23): n=unknown
  misc_feature (153)..(167): n=unknown
ggtgaatttaggaaaggaatttntggttataaactaagagcttgataggagttggaaggaaactcttactaaaatgttaactttctaaaaaccttcttttagatcttccttgggcctttggaaaaatatgtgacaagtgaatgtaagtctgtncctggngagctaatagtgcattagtctatctcagc

SEQ ID NO: 1830 - DNA, 170 bp, homo sapiens
  misc_feature (167)..(168): n=unknown
ggaacttattaccattacaaaggaggcttggccagggactccactggtttggtgatctctgccaagaagggggatgtaaacaggtggtaaagtttaacatacccgccaaggaactcgtttatgttggctgatagagcattcaggataccttaaagtttaataagagnngc

SEQ ID NO: 1831 - DNA, 542 bp, homo sapiens
ttaattgcaaaatatatcattatttcacagtggggtttaagtactcataacaatcttctggttttagtagaacagatacccactggtgtatttttttcacatttgttttctataatttcttcccctctactatttcatataaagacactaatgtggtcaaacattaaactatcaattgacaatcaccttttgcttccctattaggaaataaccttcattgcttaactgcaactcaagagaattagggcacagtcaaccatgtcactgataaaaacataagaagtaatgcatcacatttattccaatctaaacacactgtcacagatgtggtaagtgaactggaacactggtgttccccagtgggtcatcagctacatatacatcacattcttttatcaaatctggcattgaaatttccttttccatatataggtttaaaaaaataaaattaaaaaagccacaggagcaaccctgacagagaagtcttgcatgcagcttctcctgagaaagtatgtaatcttagttatcctcgaagtcagcaa

SEQ ID NO: 1832 - DNA, 475 bp, homo sapiens
  misc_feature (447)..(447): n=unknown
gcagttctgggactcagccactgggacgcttgtgaagagccatctcatcgctaatgctgacgtgcagtccattgctgtagctgaccaagaagacagtttcgtggtgggcacagccgagggaacagtcttccattttcagctggtccctgtgacatctaacagcagtgagaagcagtgggtgcggacaaaaccgttccagcatcacactcatgacgtgcgcactgtggcccacagcccaacagcgctgatatctggaggcactgacacccacttagtctttcgtcctctcatggagaaggtggaagtaaagaattacgatgccgctctccgaaaaatcacctttccccaccgatgtctcatctcctgttctaaaaagaggcagttctcctcttcccagtttgtccatcacttagaactttggcgactgggattccacagttgcaacangcaagaatggggtactcttccactctct

SEQ ID NO: 1833 - DNA, 388 bp, homo sapiens
  misc_feature (52)..(329): n=unknown
gatttgtgaaaagcaacagggtagacagttcaaggaaggacacacacagtgncctgntttaggtnccnaatttcttctttttaatgggtggtgggagctnagcaatnatgtnatccanangccgttctactgccacgantgttctttcatccaaaagatccatgaagagtagangcttatatatcttagaaattttaaaagcatgagctgtgcacctccggatgacatcngattcattcgtgggaggaaatggattgnagagtaangttttgtcatttggaangggcaatgacttgtcaatgatgcagaacatgtaggcatcatggagnaggatgtgcatcggtctcttgggatgaaaactgatgtgtgtaacccgagtatccctttg

SEQ ID NO: 1834 - DNA, 111 bp, homo sapiens
  misc_feature (7)..(98): n=unknown
aaacccngtnnncattgctatcccactagagatctcagaattacaacattcataantatctgcgtttatgtagtgcattttacttctcaaacagnttncatggttactatt

SEQ ID NO: 1835 - DNA, 214 bp, homo sapiens
gttaaatcagcatttccccaaagaatatatcatatgacgctagttccaaggggcttgactgagtggtgttttgctggggggagacaggggtttgttaatacactttactaaatactgagctgaaaaatgttaaatagatttcacgattgcctccttgaagattttaaagttcattgtggttcttcaaggcgaaatccggtgaaccattcctcac

SEQ ID NO: 1836 - DNA, 525 bp, homo sapiens
  misc_feature (480)..(480): n=unknown
tacatacctagcatcacaaacagttgcactggggatccggtccctggcaacctgctccggatccagttgctaggctgtcctgcttctactgaaagccagtctttgcatctagaaacagttgctgaggctgcatgtctctttttgcccttaggattatgatgttgatgaagaggacatgatgaatcaggtgttgcagcgctccatcatcgaccagtgagcagagtccgtgcttgctatctgtctcatgttacagagcttccattacatattaaacgtgaaatctatgactcctgtaccttacctgttcaacagacctgaaaatgagccatggcattgggacagggtcattctgacaggggaagtgggtccccaggtcagcccttctcttccctttgggctcttgccaaagtgtcttcccctactgttaaccttgtttgtcacacggtcgagttcgtattggttctcggtacttcctggagntctgccgcctcctgtggaagataatctaagcttttcacctcttgt

SEQ ID NO: 1837 - DNA, 391 bp, homo sapiens
gtcagttgaaggatttagtttcttaaaagcaagaaatgttggagtgttgaatttttaaatagaatctcttttcatgtttgaatgattgttattagttctagaagcattctctttgtcatgacccgattatgtatactcttgggtttaggaaggacaaaagtgatgaaatttgcatgagatagaataaatatcttaggaggagtgaaagaacctgaggaagagacacgaccctaagggaatgaatgcataagcagtcttctcagtagcccagagtttccaggaaacaggaatatttatatcccttgcccactcttaaaatacatagatacataaaaaggcagtctctgtagacaacacatgcacaccaccccacaccaaaacattattcctg

SEQ ID NO: 1838 - DNA, 549 bp, homo sapiens
  misc_feature (513)..(528): n=unknown
taaaagacctcaaacgtatctatatctgtacatgtacaagaactgtcaaaaattattcacagaacaaaaataaatcttctttagaacaaacccaggtaatgaaatgctgatacggatctcacatacggaataatctaaatgctgctagcacaaaaatatggcttaaaaataaaataaaatcttgggtttgtttttctaaggtgtatttctctttcttgaaataaaaaataaattatttagagctatcattgtaaaatagtcgtgtgttaacacactcttattaaggccctggagatgaaaaacaaaatcaaatttagaaggtcatttcctcacaggtgtaactcaggttaatgtgctgctgtctgcttaagttaatataactaggaaatgtctaagcaccagtcaaaatttaacctaatttactatttaactttcctgaaggtggtcattgagtcaattagtatttaaccttttgttgaactgggaatttgaaatggttccctcgaaaatttnggaaatcacataaanatgatatttacacataaatat

SEQ ID NO: 1839 - DNA, 269 bp, homo sapiens
  misc_feature (8)..(255): n=unknown
ctctggtncctctcctggcaggcagagtggctcctcacagcctgaagctcatccttctgcacgggccagccaggccagcacagaggcaccagggnagcagtgcacacaggtccccggggaanccaccatgtggagcggatgntggtgtnggcccttgtgggcgtctgcantgcagattctttcgggacgaggcagagatgatcatgagggactcccctgtcattgatggggcacnatgancttccccctnggcanttgcttggatattg

SEQ ID NO: 1840 - DNA, 392 bp, homo sapiens
  misc_feature (343)..(343): n=unknown
  misc_feature (566)..(608): n=unknown
tactaaaacaggtgattttattcattaataaatattaaatacattgaaaaacatgacacccctattaggagaatgtaaagaaaaaatatccagatatttcaactattatcagtcactgttaaaatcaacattacttttatacttaacaccctttttgttaacttacccaggaaacttgcctggtacttcggaaggtgccctcctcctctggcaaagtctgttgctttctgccggactgagagccagcaggaggctcaacagcccatccaggtttctcggtttacaaagaaactaggccccagagaggacatgtgttttcctaagattgcaaaactgagctggnataaaggcttatagatgttattaaaggggcagcaagccctttatactgt

SEQ ID NO: 1841 - DNA, 647 bp, homo sapiens
  misc_feature (566)..(608): n=unknown
atgagaacagttctcacatttatttaaagatatagaggttatggatatagataagtatgcccgactatgatccttaattcagcaatctaatattcacaatgtgtttgttgccatttagctatttatcccaacatgcccttaaaaaaaacaccaaaaaaccacatgtgcctagacagggtggaaaaagaaacaccaaggccttgctaaaaaggagaagcctaaaaaagataaaattcccacggcagttctgttcaactgtagcctgtgagtgcaggaataatgttcccgtggggaagcattatgcccagtggtttcttggtgtcaacgtgggaaagcccttgaggttttctgtcgctgtcaggaggaagcacgaaaactgtttatggaatccagtcgacgttcaggcaccgcgcgatgaacgcaaacatgtctgagacttcctctatcactttggctgtgggcttccccgccccgtggcccgccttggtgtccacgtggataagcagggggttgctttgcttcctgctgcggcccacgatgtactgaagggtggcaatgaacttcanggagtgaagcgggaccacgcggtcatcatggtcagcagtgangagcagcattgacgggtaactggatgtcactgcttctgg

SEQ ID NO: 1842 - DNA, 343 bp, homo sapiens
  misc_feature (236)..(236): n=unknown
ctccgaggccgcatcgtggagaccgaggcatacctggggccagaggatgaagccgcccactcaaggggtggccggcagaccccccgcaaccgaggcatgttcatgaagccggggaccctgtacgtgtacatcatttacggcatgtacttctgcatgaacatctccagccagggggacggggcttgcgtcttgctgcgagcactggagcccctggaagtctggagaccatgcgtcanttcgcagcaccctccggaaaggcaccgccagccgtgtcctcaaggaccgcgagctctgcagtggcccctccaagtgtgccaggccctggccatcaacaagagctttg

SEQ ID NO: 1843 - DNA, 331 bp, homo sapiens
  misc_feature (216)..(216): n=unknown
gggaccacgctccagccatacagcttcatcctgtgccaggtccctctggtcaaagctcttgttgatggccagggcctggcacagcttggaggggccactgcagagctcgcggtccttgaggacacggctggcggtgcctttccggagggtgctgcgaactgacgcatggtctccagaccttccaggggctccagtgctcgcagcaagacgcaagcnccgtccccctggctggagatgttcatgcagaagtacatgccgtaaatgatgtacacgtacagggtccccggcttcatgaacatgcctcggttgcggggggttgccggccaaccct

SEQ ID NO: 1844 - DNA, 355 bp, homo sapiens
cgatccgcaacacgccctacgatggggtcttcatagcgctgctggtggaggagggccacacccacgatatcctggccgccggatttgacggcatgtacacctactttgcctccaatggtttctcctttggttcttcccatcagaactggaaagctgtgaagaacttttgtgatgccaacaacctcatgttcatccccagtgtggggcctggctacatagacaccagcattcggccctggaacaaccacaatacgcgcaacagggtcaatggcaagtactatgagacggccctgcaggcggccctgacagtgaggcccgagatcgtttccattacctccttcaatgagtggcacga

SEQ ID NO: 1845 - DNA, 436 bp, homo sapiens
  misc_feature (54)..(54): n=unknown
  misc_feature (355)..(355): n=unknown
acagtagcactgaacatggctctagtgagtgggcctcagttcaggcagctaaanggagggggatttcctcctagtcctctccctagagctaaatatgcatctgggaaaaattaggctctggagcacagaggtatttttctagaggaaaaagaactgaactcccagcactaggtaaaactgcaaaaagaaaaacacctgtgcccaggcactagctacaaggccacaccagaaaaggaaagctgggtcctggaagcttcaggacaggaactcttccttggtcaagttttccccagcacctagcacataggaaggtgcttgatgagtgagtgttaaatgaacctgtgagtgctcaggntgatttcctgataattgggttcaggaatctactgggaggagcttaaacctagaagttccctttttgaaagtctcaaatatg

SEQ ID NO: 1846 - DNA, 443 bp, homo sapiens
cggactacctcataaatgggatgtatctatagtaatgtaatttcaataccttggggcagggacatgttttgtttataatttatacatctattaagttctggatatttacagcttcttttgtttttaattgggccagaagattctgcaaatcccaaatctttctttattatttattgtaaaaaaagtttccttagaagtcataaaatattttgaaatttagagaggaattcatgattaaagattcctaaaaatataattctgatttatgtaagctgtccctgaaaatagaaatgtgtacttagctgagagaaaattcagcatctcaggaggtggtattaggatgactgtgttaacccattacctttagaagccaactgttggccccttaccatgctggactgctataggcccagcttccccttgttctgtgggcctttcttcct

SEQ ID NO: 1847 - DNA, 426 bp, homo sapiens
  misc_feature (389)..(410): n=unknown
gttatggctatagttgacatctttccatataaaaacaaactgcacagcatcacatatagagtacagacatcttaagttcattcacaaagttaatttttctaaactgcccttcaaaaatttacatctttgctcaattctaaacattcaacaaaattagcttcccaagaaacaaaaatgatacccaatttctttgcttttctagaagtaactttccatttgttcatgtattttgatatgttatattccccacccgaattaaaccctttgttaaaagaacaacctactttaggttcagtctaaaaataaagcggactagattccggagtgtttttcaaatattttaaaatatttgccacttatggttaaaaaaaacgtgaataaggatatcntgtgagtgtagataggccncntactatacactcctct

SEQ ID NO: 1848 - DNA, 323 bp, homo sapiens
caagccctcaaggagggcaggatacgaggggcagccctcgacgtgcatgagtcagagcccttcagctttgctcagggtccgttgaaagatgccccgaatctcatctgcactcctcacactgcctggtacagtgagcaggcgtcactggagatgagggaggcagctgccaccgagatccgccgagccatcacaggtcgcatcccagaaagcttaagaaattgtgtgaacaaggaattctttgtcacatcagcgccttggtcagtaatagaccagcaagcaattcatcctgagctcaatggtgccacatacagatatccgcaagc

SEQ ID NO: 1849 - DNA, 565 bp, homo sapiens
  misc_feature (527)..(527): n=unknown
ctcagtatgcagttcagatgtgagaggcgcttctctgtacagcagcctgtactgtcttcaatcctatgcgtgcaggtgtctaccacaggcaaacagttttctccccattttgtagtaatgtgattttcctattagcaaaaagaggtcaccagcccctgtagacttaagggactcaagtcacaggatggggatttcctcttaatattttttattttgttgtttgaactcttgatgcaacattgtagagcagggtgttcaggacctgctgtgcccaagggactgataaaggaaaaagctctatttattctttttgtgatttgatgcacagatgaaaaacttaacacacaataacagaagttggtcgttaataaatcacatcctagtctttcagcgcttccgtaagcagacgacatcttcagttttctagctcttgtagtttcaacactgcaacatcaatgatgcatatgtccagaatcagttacaaagaccatccgttctttttctcttagtcactattttcactgtcnctggtccaagtgtactgagtgattacttctggcatcct

SEQ ID NO: 1850 - DNA, 404 bp, homo sapiens
  misc_feature (46)..(46): n=unknown
cgaatatggagagacgtggcataaaggtggtatcttggccaacaancaaaactgctttgatgactttcagtgtgctgctgagtatctgatcaaggaaggttacacatctcccaagaggctgactattaatggaggttcaaatggaggcctcttagtggctgcttgtgcaaatcagagacctgacctctttggttgtgttattgcccaagttggagtaatggacatgctgaagtttcataaatataccatcggccatgcttggaccactgattatgggtgctcggacagcaaacaacactttgaatggcttgtcaaatactctccattgcataatgtgaagttaccagaagcagatgacatccagtacccgtccatgtgctcctcactgctgaccatgatgacgc

SEQ ID NO: 1851 - DNA, 380 bp, homo sapiens
  misc_feature (303)..(361): n=unknown
tagataagtatgcccgactatgatccttaattcagcaatctaatattcacaatgtgtttgttgccatttagctatttatcccaacatgcccttaaaaaaaacaccaaaaaaccacatgtgcctagacagggtggaaaaagaaacaccaaggccttgctaaaaaggagaagcctaaaaaagataaaattcccacggcagttctgttcaactgtagcctgtgagtgcaggaataatgttcccgtggggaagcattatgcccagtggtttcttggtgtcaacgtgggaaagcccttgaggttttcngtcgctgtcaggaggaagcacgaaaactgtttatggaatccagtcgatgttcaggcancgcgcgatgaacgcaaaca

SEQ ID NO: 1852 - DNA, 410 bp, homo sapiens
  misc_feature (372)..(381): n=unknown
ggaatttaaaaaatcaaatttttctcttcacctttatgacttgacatttccttgatctgttggaggctaaaagtaggtataaatgatattgaatgttgggtatagtgatactctgccatagttcttactgcatgaagagaacaagagtcacacaagttcaccactttgcacttcatagagaaggtacatagagacattgcaaaacctgtctccatttgctatcctgataattaaggttttcataatacctagggcctgtctctgagtaattttaattttgccaaatacactgacatttaaaatagtgatccatctaaatttttttcagctgggtttgaggaatataagagctttccaatgataaaggttgtngtagtgtcntagtgctgaatttgcagatgatccagatg

SEQ ID NO: 1853 - DNA, 281 bp, homo sapiens
  misc_feature (136)..(191): n=unknown
ccatagcaccttggcgatgttgaaaacaaatacaaatacaaggatgtactcattttaacattttatgcatgagcatgtgtcacaccaattttgggggtaacagtttgacaacaggaacaaatctaagcaatcgacnaaacagaagccggataactggctctgacccccacccccaacatttaagagatgcnaggacacctgaattatgttaaaaaaatcaagttgatatggatattcaacagtgtctgtgctgccaaaactgaaataaaccattattcaca

SEQ ID NO: 1854 - DNA, 482 bp, homo sapiens
  misc_feature (332)..(360): n=unknown
gtgtctttggacttatattttatatactacagttattacttggcatgacagcaagcgctgtggcggctttgatcctcatgacgtcctccatcatgtcggtcgtggggtccctgtacctggcctacattctgtactttgtgctgaaggagttctgcatcatctgcatcgtcacgtacgtgctgaacttccttcttctcattatcaactacaaacgactagtttacttgaacgaggcctggaagcggcagtgcaacccaagcaggactgacgcccgacagactccaccctaacagtctcaagcccctttccattcagtttattttgcagcaggnnnnnnnnnnnnnnnnnnnnnnnnnnnnncacaacagacactttccctaagaatctcaaactgatttttaaaaatccggtaaattagaagggggcctcgctattttctgtgtcagtcttcattttaaatatgggtaccaaaaagatacgcc

SEQ ID NO: 1855 - DNA, 485 bp, homo sapiens
  misc_feature (51)..(66): n=unknown
  misc_feature (383)..(484): n=unknown
aatacttattccaagattatatggtaaatatttatatttatactgccagantacatagagaaacanggatttaattctaagttatattaccccaaaaagaaatactttctaatattgaattcaacaagatgtaccaccaacagagacagtgaatgtatttcaccttcctaaacagctatttttatatgaaaatcctaaattatctacatcagtcaatgactggcatttcaagagtaaatgattcattttacttacaatgcatcaagataaaaaggttacactgaacaactagaatgtttactgaaattaatcttattaaagtaaaacttaaaaaacttatttgggacattttcattgcttacactcaacgaacgtgaaacagngaaaaacagtcacagaatcgtgctaagtttataataaataattcacatacaacataggttaaattatcnaagaaattaaactgacatctttataccttttng

SEQ ID NO: 1856 - DNA, 454 bp, homo sapiens
  misc_feature (11)..(66): n=unknown
cagggcacggnttcctctgcntctcccggaccacttagtctcaacccggaatgaaatatgactgangactctcagagaaactttcgttcagtatattatgagaaagtggggtttcgtggagttgaagaaaagaaatcattagaaattctcctaaaagatgaccgtctgggaatcttgcctccacaccacgagtcccatgccaaggtgatgatgtatcgtaaggagcagtacttggatgtccttcatgccctgaaagtcgttcgctttgttagtgatgccacacctcaggctgaagtctatctccgcatgtatcagctggagtctgggaagttacctcgaagtccctcttttccactggagccagatgatgaagtgtttcttgccatagctaaagccatggaggaaatggtggaagatagtgtcgactgttactggatcacccgacgctttgtga

SEQ ID NO: 1857 - DNA, 455 bp, homo sapiens
  misc_feature (353)..(353): n=unknown
caccaaagcaagaaaagtgtattattcaatcagtttcccagatcacatgccaagaacacaatgctcactgtggtgcctggcagacggtccacaaccagcgggtgcgttcagcttgaatggaccggggtcccacagtgtttgtgccacaagtcaatggccttgctcacgatcgcgtctgagctgtcctggggaatattttccagaaactttgttatcttctctgcactgttcagtgccataacttttattttaaaggttaataaaatttcgacagctacaaaaactaggatcttacaggatccactcacaactttatcccaaaccctctgtaaactggattcaggcaaacatcncgcaaagcacctcttgaaccagagatcataaggaagtttgggcgccgcggaacacatcctcagatgagtcagcagtctgccatcttccagattcaagtattg

SEQ ID NO: 1858 - DNA, 578 bp, homo sapiens
  misc_feature (506)..(570): n=unknown
gtcgaaaatggaaaacagatatcaggatttggaaaaaaattttactacaaagcaacagttatgtttgaatgcgataagggtttttacctcgatggcagcgacacaattgtctgtgacagtaacagtacttgggatcccccagttccaaagtgtcttaaagtgtcgacttcttccactacaaaatctccagcgtccagtgcctcaggtcctaggcctacttacaagcctccagtctcaaattatccaggatatcctaaacctgaggaaggaatacttgacagtttggatgtttgggtcattgctgtgattgttattgtcatagttgttggagttgcagtaatttgtgttgtcccgtacagatatcttcaaaggaggaagaagaaagggaaagcagatggtggagctgaatatgccacttaccagactaaatcaaccactccagcagagcagagaggctgaatagattccccaacctggtttgccagttcatctttgactctattaanatcttcaatagttggtattctggtagttcactctcatgagtgcaactgtgggtttagctaatantgcaatgt

SEQ ID NO: 1859 - DNA, 441 bp, homo sapiens
  misc_feature (408)..(408): n=unknown
attttttaaaaaatgagcaataaagaacctctatcagtgagacttctcattttatagcaaatacatttttgcagcttaaattttcttgaattcatatacgcttctgtcatttaaacaaacttccagagaaaactggtctctatatatttaagtaacaaatttgacaaaatacatatttatacatatatagatctctaatataaatattaaatttgaaaaaatcaaatgtgaagcagaaactgctatacaagtatattgtataatatttattttatacattaaagtatttggttgaatatacttcaattaggtttctaaaaaacaccattatctgcttcttagtaattgcgacattcttgaaaagcatgtgaaacgggtataaacttcaactctgtggcttaattcagnattcctgtttgttctcctcaaacttttatcttc

SEQ ID NO: 1860 - DNA, 466 bp, homo sapiens
  misc_feature (332)..(445): n=unknown
agctgcccatcatcagtgtggacaacctccctcctgcctcatcagggaagcagtaccgcctggaagttggacctgcgtgcttcctctgacctctgacctcgtggccactctaggcctcatggaggagggaagaggaagaggcaaggggagggtactgaggggcagatggctccaggagaggcagctcccctgcccaagggtccttgggcagaccccagctgttgtctgcccagtagaagtgggtgggggtaggaggggatagggtgtccttgggaacaatggatcccagcttagccccaaagaccaaccaaagagccagccagagtaagctngacctgcaacctgcctganccccgtggcctctcagctctgggccaacccgttccctccccagttctgccaaagagcccacattcaagcaacttgaggaagggggtctcgtcantggtcctgtaggagtattatg

SEQ ID NO: 1861 - DNA, 557 bp, homo sapiens
  misc_feature (128)..(128): n=unknown
  misc_feature (264)..(542): n=unknown
cttttttcatgtctcctttctaatattgcacatcaatagctccctagcagggaccagctgacgagacgcccccttccctcaagttggcttgaatgtggggctctttgggcaggaagctggggagggancggggtggccgcagagctgagaggccacggggctcaggcaggttgcaggtccagcttactctggctggctctttggttggtctttggggctaagctgggatccattgttcccaaggacaccctatcccctcctacncccacccacttctactgggcagacaacagctggggtctgcccaaggacccttgggcaggggagctncctctcctggagccatctgcccctcagtaccctccccttgcctcttcctcttccctctccatgangcctagagtgnccacgaggtcagaggtnagaggaagcacgcangtncaacttccaggcngtactgcttccctgatganggaagatggaggctgtccacactnatgatggggcagctctcgagccgaattccgagntacgtacgcgtncatggacggtcatag

SEQ ID NO: 1862 - DNA, 462 bp, homo sapiens
  misc_feature (22)..(22): n=unknown
  misc_feature (412)..(412): n=unknown
gatcaaggaaggaaatcttatngggaagaaggccttagcaatgcttaaatttatggaaatatgattgatttccagtattatcctttgccagcagtgaactgccattctgtcacagctctgtgtctgatacaaggcacatagattctgtacttaccatccccaaattgcaatgtctcagactcaggcttagagcatggcatgaacatcaaaggcaggaacctgtttatctttgaattggaaagatacagcaaaattacactgtttggaaatacgaatagaggagtgaaaattgttgcagtggggtacccaaagggattcgagacctcaagttttttttcatcttgtatccttcaggtcctcttgcccctggccaatgtggcataattgactacactctggaatcctgactgcnacaggtgtacaggaaacatttgtcttttgttgctggaaagctgctcaaat

SEQ ID NO: 1863 - DNA, 427 bp, homo sapiens
  misc_feature (10)..(414): n=unknown
tctttgtcananaaaacccaanacanacanatacaaagtttcagctgctcacctcctgataagtgnanaaaataccctnagaactnacaatgacatcnaagnagacacatttttcccctctcacatttcccctnagtnacattcatcctgaaaaaactggaaaaagatggcgaaacatggaaagaaaagnngcagggccttacagnaaatgttcttngattngagcagctttccagcaacaaaagacaaatgtntcctgnacacctgnggcagtcaggaattccagagtgtagtcaattaatgccacattggccaggggcaagaggacctgaaggatacaagatgaaaaaaaacttgaggnctcgaatccctttgggtaccccactgcaacaantttcactcctctattcgtanttccaaacagtgt

SEQ ID NO: 1864 - DNA, 360 bp, homo sapiens
  misc_feature (13)..(54): n=unknown
  misc_feature (168)..(168): n=unknown
ggcaaaccctatncccggatgtgcattagtggatttgatgagcctgtcccaganctctgcagcctcaagcggttgtcttaccagagtggggatgtccctctgatctttgccctggtggatcatggtgacatctccttctacagcttcagggacttcacgttgccccangatgtggggcactgacctcacagctctgcagaggatggagcttgctccgggggaccgggactgtctgttctcagggaccatctcggctgcctcctgtacccagactctaacctgtagcttcagaggccagtctgggccttggccctgggtgtctgatactcacagagtgaaatgtgaccctctcccttccct

SEQ ID NO: 1865 - DNA, 434 bp, homo sapiens
  misc_feature (382)..(414): n=unknown
gcacattgtttttcctgcctttttatggctgtctaaagtctagggaaaagggaagactggttaatgatgagtagaaaaaacttgtaagctaatcattcactgacttattttccttccattttctggtttttaaaattagccacaccacaggaaacccacatttttagatggaaagagcaagaaaattgtgtcagtgctcttagttattttcatcttaatggtatagtgaaaagacattgacttgagatgatactaaggaagctttggctcactctcacttgaagaggggatcttggtgttgtagtacttggactgtacaaatgttttactgacttttcttactgctgtaaaggaatcaggcagttgggtattgatatgttanttggtgctctccattcatggcaaaggatttgntaaataaaagtctttaaaca

SEQ ID NO: 1866 - DNA, 384 bp, homo sapiens
tgaatattttttctcagtgatccttgttctgatgaatattacatttcatccttagttttgctcatttgattttgctttagtgtttaaagaacttttatttatcaaatcctttgccatgaatgagagcaccaaataacatatcaatacccaactgcctgattcctttacagcagtaagaaaagtcagtaaaacatttgtacagtccaagtactacaacaccaagatcccctcttcaagtgagagtgagccaaagcttccttagtatcatctcaagtcaatgtcttttcactataccattaagatgaaaataactaagagcactgacacaattttcttgctctttccatctaaaaatgtggggttcctgtggtgtgggctaatttt

SEQ ID NO: 1867 - DNA, 393 bp, homo sapiens
  misc_feature (2)..(2): n=unknown
  misc_feature (247)..(285): n=unknown
cnttcacttggatggcagttgagtctctgaaagagattcatcccgaagtcttttaagtgaagagaggcaaagcttagcttagtatttcctttctgaagagcacatacccctgtgtaaaattgaggagcaacagccttaaatggaagcagctgtgattccccgcccctgtgaaggggctgtggccctgcagatgccacggctgtggatgcgtagagcttgggtaccctccctggcttcatggctgacnnnnnnnnnnnnnnnnnnnnnnnnnnnnnnnnnnnnnnnttgccatctgcaaaatatggatacagacccgtgctccctcctggttttactgaggtactgtgagagccagtgaaatcacggttatgggatgctcagcattctgctgca

SEQ ID NO: 1868 - DNA, 354 bp, homo sapiens
  misc_feature (74)..(112): n=unknown
  misc_feature (272)..(323): n=unknown
tcactggctctcacagtacctcagtaaaaccaggagggagcacgggtctgtatccatattttgcagatggcaannnnnnnnnnnnnnnnnnnnnnnnnnnnnnnnnnnnnnngtcagccatgaagccagggagggtacccaagctctacgcatccacagccgtggcatctgcagggccacagccccttcacaggggcggggaatcacagctgcttccatttaaggctgttgctcctcaattttacacaggggtatgtgctcttcagaaaggnaatactaagctaagctttgcctctcttcacttaaaagaccttcggggntgnatctctttcagagattcaactgcccatccaa

SEQ ID NO: 1869 - DNA, 422 bp, homo sapiens
  misc_feature (69)..(71): n=unknown
acttttttcttaagtgcacaaagcatcgtactccctggaggcaaacacatcgggctgcttcagcgttangnggatgcttagcattttgaatattgtggcaaaaaaattaaaagttcacttattaatatttatcagcagtatcataatttccatcctcttatttcagaatttcacttgaggcaaaaataccacaagtgtaattactctagcacagctattaatgtgctggatgataggccactgcgtcacatgaccttctattgttcatgggtttaaagagaaagcagggctttgtatttctttttcttcttttaaagtcgactgtagcatcttggcttttgtctgggggtggggaggatctggggtctggttccactttgtaaaagtaaacccatgtctgtttaaaccatagaggtgttaag

SEQ ID NO: 1870 - DNA, 469 bp, homo sapiens
  misc_feature (191)..(462): n=unknown
atcttaatactattccatattccagatagagcaggctttaaattcacacttcacaagactccagggaaaataagttactaatgaatggtatttacagtggcagcatcgaagcatgctttcatttactcttctaaagttactgtgtaaactacaagtaattaaaagaaacgcagaaagtagtttctcctatnaaatgtggttcaggcnaaaaataaataaatataattaccgaaaggctaaggccagngaatcngccacnaaacngaaacnggggaaatggccnatcaacaaannccaggagccgttagacgattncgggccngtnnggtcanagtcgtgctncataaatatctgtttaatgtccataaatatctgtttaatgcagagcaagacccagngctcctgtcagtanctccncccttcctcattcctgttcccatcatnctaaaggtctcaactngntttttca

SEQ ID NO: 1871 - DNA, 397 bp, homo sapiens
caaaatatatttcaacagtaattaacaatttttaggggaagtacacaggtgtttaatagagatcctaactttggagttagagagattcaagcttttctacttctagatatgtgacaaggtcaggtaaggcaggtttcttggttgtccccttttgcactgtaaacagagttttcattcaccgtctgttggggtcttagcttcattcacgagtctcctgttacagctggtgcctgcctgaggtagggaagtcgatcttctaccccttgcacaatcattaagggagaaagctccaagtgtccattctttggtaagaatcatgagggaaaaaaagggttccgcacttctctctcagtattcctgcttttatttcattttttgacctttgtggaatcctttt

SEQ ID NO: 1872 - DNA, 471 bp, homo sapiens
  misc_feature (194)..(350): n=unknown
agctacattttgtatcatattaccttatgagtcttcccgtctcagagcaagtaatacaattaatgacctggtaggtagcaagaacctgctgtgcttcctttcagaccttcatcctggtggtggtggctgttggttgcattgtaggtggttttctaatttataatatctataaagtggttcaggtttaaataccnnnnnnnnnnnnnnnnnnnnnnnnnnnnnnnnnnnnnnnnnnnnnnnnnnnnnnnnnnnnnnnnnnnnnnnnnnnnnnnnnnnnnnnnnnnnnnnnnnnnnnnnnnnnnnnnnnnnnnnnnnnnnnnnnnnnnnnnnnnnnnnnnnnnnnnnnnnnnaagaattaaaccaagtgaagccaagtgctagacagttttagctctcaaaacttatatttccccattttcggttcagaaatgggtagaattcagttaggtgcaacattctccacacatcttt

SEQ ID NO: 1873 - DNA, 343 bp, homo sapiens
  misc_feature (4)..(4): n=unknown
  misc_feature (306)..(333): n=unknown
cggnacggtggcccagcatggaggcagccacagctccggaggtggccgcaggatccaagctgaaggtgaaagaagccagcccagcggatgctgaaccaccccaggcttcacctggacagggggctggcagccccactccccagctcctgccccctatagaagagcaccccaagatctggctacctcgggccctgaggcagacctacatccggaaggttggggacacagtgaacctactaatcccattccagggcaagcccaaacctcaagccatctggacacatgatgggctgtgcttggacaccngcgtgtgagtgtgcggaatggggagcnagactccatc

SEQ ID NO: 1874 - DNA, 436 bp, homo sapiens
  misc_feature (44)..(428): n=unknown
gacatggtgccgaagctccttgaggacacagtctcaccactggngggcttcctggaggcactttgtcagagtacgatgccttcttaggtgtcctcaattaggaactttcacatccaccagacagtncacagatgcctcccctagggggttcacngccttgcaggtatagatncctnnatcaaagggacccggcttncggatctctanggagcagattnccaggtganacaggnctctatacttngggntgcctnggatatncntcttgttcttcagcnagatgntcttgggccgggganangcgcggacacagcagaagagctgggnattatanccggtgantgtagtgcagttggccagaggctgggnaaactttgnngcttcagagaagtctcgntggggnaaaccccttggtcttgttaacagtngctgcttt

SEQ ID NO: 1875 - DNA, 416 bp, homo sapiens
  misc_feature (187)..(187): n=unknown
  misc_feature (327)..(407): n=unknown
gcagcgtggaggctcccaggaccaagtcctgcgcctctttggcggggtgtgtgcaggaggaggggggataaataggaggctccctcctcccggcgacattcacggagccggccggcctcccgccctgggtgtttccctgccttgtagccagggtgccagcctgggaagtagtttcgtttccttctgnctccgggattagtttccaggcaccctctcaggcgcccgaggcccgggaagggggcgaagaaggagggagacttgtctaggggctgcccggcccggcagagcggggttgatggaccgggccgcccggtgcagcggcgccantccctgccactgctcctggcccttgccctgggtctagtgatccttcatgtgtggtggcaaatgggaattccaccagaagncctgaaaac

SEQ ID NO: 1876 - DNA, 259 bp, homo sapiens
  misc_feature (228)..(256): n=unknown
aaataatttcgttggacacgttgcttgtgcctttccatgctgactatcagactctgcgcccctgaggctacctgtgccccaaagacaagccccttgagctcccatgcaggctcagctccaccccaagatctgggctccttctgccttcagctgcagcagcctgcccaggactacctaagcttgtggccaagctcacccagacctcaggcccttgaaagcagggtattnncaaggnttnnncccannnnganagnnnaaa

SEQ ID NO: 1877 - DNA, 425 bp, homo sapiens
  misc_feature (48)..(416): n=unknown
agcacaccaagaacctgcaccggcactgagttccctcagtttttattnattattatcttcattatttcagcaaaaangaatgtagtaggagggcagggtnataataagnananggtcanncacaaacatgtnancaatnnnatctatgncataattnagtttgnannnaaggtactatncctggganatgcacgtaggccacaatttatgtntctctccacccaaacatctcantggagtaangcatnacaaggnagcattgctgcnaacatgtctcgcctcccangatagggcngtnnnnnncctntcncagggttggacnaatntncaatcaggtnttatnccgncacattcagttcccangggcaggcaggagacagtggccttcctctatctnaactgcangaggncntccncttttacta

SEQ ID NO: 1878 - DNA, 372 bp, homo sapiens
  misc_feature (336)..(370): n=unknown
aactgtaattctttcttgtgtgagatccaagaaccttcttgtagggtctggattgggacccttttctggtaacatcttcctggtgaccatgaagggacaatactgaagagacccctgaccctaaggaaatagactgcagcaccaatgggccaactttggggcgatcatcttgcccagaaacatcatgttgaaactcttggtcagaggttggatgaaagctgacagggtccatccaggagcaagtttgagccttgccagttccattttgggtgctgagtggagtggcgactatagcaaacctgtgatctctggctgctgctccagaagaaacaagangggagggatgaatatgtaaaactctggatcatantc

SEQ ID NO: 1879 - DNA, 283 bp, homo sapiens
  misc_feature (3)..(248): n=unknown
ttnccanaaaccatgnactgggaaactgttgaaancaagctgntatgtggcngctagctnattccaatagaggctcagaattagaatattgatccagagtnttacattattcatccctccctcgtgtntcncctgntcagcngctcnnagatctacaggtttnctnanattcgccactcnactcagcacccaaaatggaactggcaaggctcaaacttgctcctggatggaccctgtcagctttcatncaacctctgaccaagagtttcaacatgatgtttct

SEQ ID NO: 1880 - DNA, 508 bp, homo sapiens
  misc_feature (131)..(290): n=unknown
  misc_feature (395)..(489): n=unknown
gtgggcactaagcctgagaggaaagtcaccattgggggcttcgccaagctggactgagccttccaggcccctcatgcagacctggggtcctcctgggccctggcccccaaacctcttggcacccggttgtnaccccctggcagcttctcccccaaactctcctaccatgtggccctgctccttctcccgtgtctntcttcccacagttttctcttgacccaggggctctcttctgcccacctctctggatgnnccccgttctctccattgcttgttagccaggnccccanccccactgagtctgccctatgacctgcctttggatgttacccaagccatggagagagccccttctccatccctgtcctgtgccccccaggctgattgggaggganggcactggaacactgggcatgatctccagctctgcncttgccctgccaagctccctgccctgttgatgctgaactacagccttgggacaagcangctttggggctggacgctg

SEQ ID NO: 1881 - DNA, 306 bp, homo sapiens
  misc_feature (165)..(165): n=unknown
  misc_feature (276)..(276): n=unknown
agctgttgctcagcacaggcctagcagagcccactgcagggggacggcagcgggcaccagaggccttgcctggcccaacccaatgggaacacccagactcagctgggtccccaagggagacttggcacattggcatgggtgtgggacaggtaaagcatgcaagancgagaagagggacataaggggcatgcggctgcggggtgttgggacccaaataaataaagcaggatgacagggtccccttcccctcaccaggaatgcctggacagcgttcanccccaaagcctgcctgtcccaaggctgtag

SEQ ID NO: 1882 - DNA, 540 bp, homo sapiens
gtcctattgagaaccacggttacctatattatgtattaatattgagttgagcaaggtaactcagacaattccactccttgtagtatttcattgacaagcctcagatttgtcattaattcctgtctggtttaaagataccctgattatagaccaggcatgtataacttatttatatatttctgttaattctttctgaaggcaatttctatgctggagagtcttagcttgcctactataaataacactgtggtatcacagaggattatgcaatattgaccagataaaaataccatgaagatgttgatattgtacaaaaagaactctaactctttatataggaagtcgttcaatgttgtcagttatgactgttttttaaaacaaagaactaactgaggtcaagggctaggagaatattcaggaatgagttcactagaaacatgatgccttccatagtctccaaataatcatattggaattagaaaggaagtagctggcagagctgtgcctgttgataaaatcaatccttaatcactttttccc

SEQ ID NO: 1883 - DNA, 537 bp, homo sapiens
  misc_feature (82)..(531): n=unknown
taaatatttccaccttccttaattttaagtttgctaaaacaaaatatctaatcttttttaaagtacttacataatttctgtnttggnncagtgtggtncactctcaatcactctcagttctttgataaatttggggtggaaaggtttggngtatgtctttatgcactgacatctaagttntttagcactccttggnaaaactgnacntgttggnggaaaaagtnattaaggattnantttatcaacaggcacancnctgcnagctacttcctttctaattccaatatgattatntggagactatggaaggnatcatgtttctagtgaactcattcctgaatattctcctagcccttgacctcagttagttntttgtnttaaaanncagtcataactnncaacattnaannacttcctatataaagagttanagttcttntannacaatatcaacatcnncatngnatttttntctggncaatattgcataatcctctgtgataccacagtgttatttaatagtagggnaanctaaag

SEQ ID NO: 1884 - DNA, 429 bp, homo sapiens
  misc_feature (19)..(19): n=unknown
gccagaacactacagcccngtgtgcggctcggacggcctcatgtacttctcactgtgccacgcagggtgccctgcagccacggagacgaatgtggacggccagaagatgtgtccgtgaccctcagagatcctttgccctgggaatccagtggattgtagttagaatactagggggcatcccggggcccatcgccttcggctgggtgatcgacaaggcctgtctgctgtggcaggaccagtgtggccagcagggctcctgcttggtgtaccagaattcggccatgagccgctacatactcatcatggggctcctgtacaagtttcagttaccagaggtccaccacagtctgaatgtattaaataggaattccagaagcaaacagttcataacctttaaagcacgcgccgttctgcaaagtctggtgaaat

SEQ ID NO: 1885 - DNA, 260 bp, homo sapiens
  misc_feature (59)..(59): n=unknown
gaggacacacaagccttcctcgggctgcaggcccgccgccctcccagtgggattcacancccctgcggagtttgtcctcacgcacaccacacacgatcgggtataaaacacattctataaacacgttctgatgcaaactgtgtgtccataaatatatatttatgcaagttcctcccacccactgcagggccgtacagctctggggacaggaggtcacagccgactttaaaccacaggttaagtagaaggttgcaggtcaa

SEQ ID NO: 1886 - DNA, 234 bp, homo sapiens
  misc_feature (17)..(215): n=unknown
tgtttttcctgcaacgntcacgaacatgaacatcaaaggntcgccatggaaagggtccctcctgctgctgctggtgtcaaanctgctcctgtgccagagcgtggcccccttgcccatctgtcccttcgagacctgtttnaccgcgccgtcgtcctgtcccactacatccataanctctcctcagaaatgttcagcgaattcgataaacggtatanccatggccgggggttcatt

SEQ ID NO: 1887 - DNA, 328 bp, homo sapiens
  misc_feature (20)..(104): n=unknown
ggagactttcttaaataggngctctccccccacccatggagaaaggggcggctgtttacnnnnnnnnnnnnnnnnnnnnnnntatatttccctcctgctccttntgcgttcacaagctaagttgtttatctcggctgcggcgggaactgcggacggtggcgggcgagcggctcctctgccagagttgatattcactgatggactccaaagaatcattaactcctggtagagaagaaaaccccagcagtgtgcttgctcaggagaggggagatgtgatggacttctataaaaccctaagaggaggagctactgtgaaggtttctgcgtc

SEQ ID NO: 1888 - DNA, 367 bp, homo sapiens
  misc_feature (7)..(8): n=unknown
gcaggcnngggaggaggcggactggtcgaggagtggggatcgggggttccctggagtggcgatggaaggcagccctcgctgcatgcttcacattacagagggtgggagggataccgcctgcccgtccctcggccaaagactgatgcgaaggacctgcaaatggggagatggcgtatctcactgacaggacctccaccttggaccaaatgaaagagatctacattccaaaggaaactggctagggagacctttaagccgtgcctactctttggaggagggactctcaactgaagcttctgcggatggttaactgggtggatgtcttcccgcttccttggccgtgattttatcaacttgttactagaca

SEQ ID NO: 1889 - DNA, 488 bp, homo sapiens
acaatgaaagcctcaaagaaagacaagaagttgccaaggagcaagacttaaatgtttaggaatcttcagcaaagcatcatctctaaaacttataaagatcataattacaactttttttaagtccaaaagcattaacatagatagtcaaagggctcaatgaaggagtttcctcttctatttaccctacagaagttttcggatggggataagagcccggtaaggcaatgctgctgattaatcgcatgggcctgggtacctcctccagctttgtaagggcacacctctacggagtcaagctgcacagctctccctgtcctatgaaggcagggctttgagtctgcacccaaggaaggaaaaggacaccacggaacaggctgtctacgctgcgggctgctatgcaatcattccatggagtccccttcttttcattcataactcacccaagagtaaagcacagaagggcccacaaagttagggcctgcagacat

SEQ ID NO: 1890 - DNA, 554 bp, homo sapiens
aaataaataataaaactcaaacgttacagatcccagtgggggctttggatctggccttgcttccacaaacagaacacgccctaacaggccttaatgctttatcaggtcaacttgcaaaactaaaaaacaaaccaccccaatttcccatgtcctggactctgaaatccttgaggaactgctctatccgatgtcagcctcagggctgctaggagtgacatttgaaatccacacttactaccagcagtcctgggagggcatctgctgatctcactgtagcatctttctgtcttgccgagcaatttccctcagaatgctttcacaagggaagtctctagtggcatcaaaccacaaagctctgggtgcagcgacattcttgtgggcccttgccgtgatgacaaactctgagatttcctgtggggctcagcatggccagggaaatgacattgttggagttattgctcatcggcctgaggttcttttttccaggagtcagactgaggggctggtgtttcattctcatcctcttaccaaggaaagaggctccagtccctaga

SEQ ID NO: 1891 - DNA, 214 bp, homo sapiens
  misc_feature (187)..(201): n=unknown
atgcttcttcagccctcagtgagttcttggcctcttgccaaacatccccattgtgggcagttggtaccctctgaccattttacagatctgccagtgagcgaacacgagaattagtgaggctttgggtttttaatttggaagtcatggtagagacagcgaaaatatggccattgccttcagttttttngantaatannagancttgaagttggtg

SEQ ID NO: 1892 - DNA, 340 bp, homo sapiens
gatccgggaaacccaggccagactagaggaatcctttgagactctcaaggaacattatcagagggactattccttaataatgcagaccttacaggaggagcgatatagatgtgaacgattggaagaacagctaaatgacctaacagagctccaccagaatgaaatcttgaacttgaagcaggaactggcaagcatggaagaaaaaatcgcgtatcagtcctatgaacgggcccgggacatccaggaggccctggaggcatgccagacgcgcatctccaagatggagctgcagcagcagccagcagcaggtggtgcagctagaagggctggagaatgccac

SEQ ID NO: 1893 - DNA, 334 bp, homo sapiens
  misc_feature (105)..(105): n=unknown
  misc_feature (324)..(324): n=unknown
atcctattagaaaccataaggaagcactgagagtttgagtattacattcttcaagtatgctgttcggattttttatttttaggttggtaactatacacatataanaaaaccttaaaagtgcggccaagggattttgcttaaaattaagtatttagagggctacttaaaaatactgtagtaggactgtgcagtgatcctttgggggatgatgctttcacttttgtatcctcgtcaaggttaaggggcaggttcaaaagtgatcatacttccaggattagcgtaagtggccaacttgggtgagaaagccagagagatccatgtgtncttccacgga

SEQ ID NO: 1894 - DNA, 482 bp, homo sapiens
gcacatcttaatatcactgttgtattaagttttcaagttccagttatttcataaatgatttttttgtttgaatcagtatccgtatagggctcatagattttattgatgtcgcttataactgtgtctatagttcttcttccgttatttccccatgtcgccccaccctttccttatttagtttatgaggaaattggatcattggtcctgtaggattttcctctagttggattttgctgattttcacctccctggtggtatttaacattatttgttaaattgatggttacatttagaggctccatcagattcagatgtttaagattttaaattaaaacattttttatttttggcaagtatactttatatttagtactgtgtatctccattaggaggcacctaatttttggtggtctccctgctgtgttttgagggctcaggtgacaaattgaagcgattccagatggatcagtgttgaggtatag

SEQ ID NO: 1895 - DNA, 470 bp, homo sapiens
  misc_feature (116)..(253): n=unknown
  misc_feature (401)..(434): n=unknown
gtcgggtttgcgctattaacatatgtacagtccagcccagcaaaagggacccaccccgccatcctggcctggctgagccggggagtgacaccagggtggaagggtgaccctcaggntctggcaggaacagatgangcagggttccangcacggngtccccagnactngnggtncagancccccccaggnggagnacatggccactncnccaganacccctaaactggggangngtacangcagggngtaaggngaagtccccattaacacaaagcgagaggactgtgtagccccccaggacagaatctgtacaggccggcaccccaggtttccacaggaaacagctgctggctgctacaaaacatttacagcttcttctccgcaaagaaaaacaatcaggnggtggtgngcaggnncgacaggagaggcanannctgcctccagggactgaggctccctcgctgggcttg

SEQ ID NO: 1896 - DNA, 304 bp, homo sapiens
  misc_feature (210)..(242): n=unknown
ataatttctatttataatagaattcttttcccacttcttgctactgcatttcactagtctaaaaaataaaaacattataagaaatgtagactcagacttatttataatgcaacagaatagatgatggtgcctgcaattgtggaccatcccaaatgttctcctacttctccccctttctggttcatttaggaaattattcaattcctggtnatcattgtgggctgctaaacttggtttactcnctcccctcaccaaagggaagacagttagttgaccctggctgctgcagttcacattctgctag

SEQ ID NO: 1897 - DNA, 579 bp, homo sapiens
  misc_feature (226)..(226): n=unknown
  misc_feature (356)..(543): n=unknown
tgtctgcaggaggaaattagataggagctctggctgacctttaggctggggggcggggaatcaacatcgtggcacacctgaaaagcatttgatggcacaccaattgggaagttctgaattagaaagcctgtgttccgcttaaaagagccgaagctattcaattctttctgagcattgctatatgacaatgcaagcccagggttgctaaatcttacatttttcatgngaagatagaagattgttatgtaaaaaacactggcagataatttctttcagaattccgtgacaggctaaccaaaacccatatgttgaccagatctgtcccacagtccaccagcttacaagttctgatttanatgcaaaaatgaaatcgtacaagtgccagcaaagaacacatgacattattttcncaatcttggaggaggaaagacctttctaagcacaatcaagccagaacccataaaggacaagacatttaactgcattannatgtaaaacgtatgtgtaaacccaanattatgnataaacctaaaggcnaatganaacagctttcccccaggctctagcagaatgtgaact

SEQ ID NO: 1898 - DNA, 443 bp, homo sapiens
  misc_feature (143)..(143): n=unknown
  misc_feature (423)..(423): n=unknown
gtacctggcttctgagtggttatctaagaagaagaaaagaatctacagtataatgagagttaaccatgttttgtccaaaatgattttgaatcaccgttcggacagatcttgaagactagtggaaacttcaaatggcagtatcnaacttctgttccttttggggttgttgagtatatgaagaatattatttttctgtgtctgacagtcggtagctttgacatgattatagtgaagtataatttagatgttagttttaactataatagactgtaactccttgtattttgggtgctgtagaaattacctttccctttgcatgtacgtgacagttaagatctgaagaatcttgattaatggttcttggatttatgtttaaagaaatcaaggatgggcattttctcatctccgtctttgggcatttgnaacaatatacaggttgagta

SEQ ID NO: 1899 - DNA, 123 bp, homo sapiens
  misc_feature (8)..(119): n=unknown
tataacantaagccccatangnnanggtncctnatncattcaaggancncaaaacaactctaggagatcgcctgtgttccctcccatccagcntcacccgctgcntactctcctcangnccct

SEQ ID NO: 1900 - DNA, 396 bp, homo sapiens
  misc_feature (300)..(375): n=unknown
tgaccaccaggacctggtgtctgtgcacatctacatcacccagctggctgagaagttcgacctcaggaccactatgctgtacatctgtgagcggcacttccagaaggttctgaaccggagtctattcacaggcctgcgctccatcacccactttggccgtcccccctttgagcccttcttcaactccctgcaggaggtccacccccaggtccggaagatcggggtgtttagctgtggcccccctggcatgaccaagaatgtggaaaaggcctgtcagctcatcaacaggcaagaccgggnntcattctcccaccattatgagaacttctagggnccttcccggggggtctgnccactgtccagttgagcagaggnttgagcccaaactcacctctg

SEQ ID NO: 1901 - DNA, 475 bp, homo sapiens
gagaagagggctgaggagcattgcatacataggtattgggccagggtctgatgaaagaacgtgcttaaaaccttgggtgaaattagttgtggtgttagactggggtgccgagtgggtttctgtaaatggcttgccatgggtccagcctctacctcctgcaaggcatttgccagcccgtctgacagtggggagcccagaagaggaggaggtatgggagtagggagggttctaagatgccagcatccatgctcccactgcatccttacactcaacgccccaacacacatacagacatgcacacacatagtacttgtcaggtcagcttgtcttctgagatttgtttctgaagtctggaagcagaggtttcactttgccccaaaccagtagctcccctacttctcactctagtccctagacactgcccccccaccatttctccaggctgagacacatcctggtcctgggggtccctgag

SEQ ID NO: 1902 - DNA, 310 bp, homo sapiens
  misc_feature (297)..(297): n=unknown
ctacaccgttcctgtcaatgttccgtacaggcccacattcccaccactaagccaatggagtcaaccagatttctaaagccatggatatacgtggtcacggggccacatttctgcagctggctcagtggcaggcttgggccgtctctcagtaccatctaagacttctgtctaggttcctgtttttttagactcctgaactgccattctgattagacacaattttaatggaatttttggatttaataatagttgataatcaccttatgtatttgcacaatctctttataattaaaaacncgctaaagcttca

SEQ ID NO: 1903 - DNA, 466 bp, homo sapiens
ttgtaaccacaaaagcactgtaatcatcatttcttggaaaagttataagcatatttgaaacttgaaacttctaaaatcttggttagagaagaaaactaaattctacatttagtggaattaagcttctacctaatagcttttataccaactttccaaaagtaggagtggtaccaggtttccatgtaaacccaagaaagcagtttatccatccacacagcccaacccttgctccaatgagcatattactgggtccaaagtatacagctttcatatctgtcagtcagtgtgcaagtgttaaccacttcatgtgactgagttcaatgttatagtgcatgttgcagtctaaacattttctaaagtgtctgtaagtacacaaattagcaacatagtatcagcgttacagagaattccttcacataatatagaacaggcctagaatttaaagtgaaactacaatctgtttcag

SEQ ID NO: 1904 - DNA, 221 bp, homo sapiens
  misc_feature (25)..(221): n=unknown
aagacagagttgagtcccacagcangggngagcaagaacgnacangatatgcaagtggatgagacactgatccccaggnaagttccaagtttatgttctgctcgctatggaatagccctcgtnttacatttctgcaatttcacaacgttagcacaaantgtcatcatgancatcaccatggtagccatggtcaacagcacaagccctcaatnccagntcan

SEQ ID NO: 1905 - DNA, 327 bp, homo sapiens
  misc_feature (302)..(302): n=unknown
gccatctatttcaagggaaactggaaggataaattcatgaaagaagccacgacgaatgcaccattcagattgaataagaaagacagaaaaactgtgaaaatgatgtatcagaagaaaaaatttgcatatggctacatcgaggaccttaagtgccgtgtgctggaactgccttaccaaggcgaggagctcagcatggtcatcctgctgccggatgacattgaggacgagtccacgggcctgaagaagattgaggaacagttgactttggaaaagttgcatgagtggactaaacctgagaatcncgatttcattgaagttaatgtcagc

SEQ ID NO: 1906 - DNA, 501 bp, homo sapiens
  misc_feature (305)..(487): n=unknown
catattggctctattaaaaactcaggtaataaagcactaagcttgatttttgtattgctacagtctctttcttctaaggggaagaaaatctccccaagaataggatgctacctgaggaattatgccgaataaagaaaaggaatggatggtcggcagtgaaattttcttcgggcatcaacatgcagaaagttgcgatgcctgctgtggcagctgccgcctctgttccctcttcattcacttccacaaatgacttgtggacaatttttgatataaaaatatctctggctcctgacatgccagacagntcagccttgctactgttaaagagatcctgcacacctaggcgggcgaggtcggagttgagagtgtaactctcttccagtttgaacctgggcnagctgncattaacttcaatgnaatcgagattctcaggttagtccactcatgcaactttttccaaagtcaactgttcctcaatcttcttcangcccgtggactcgt

SEQ ID NO: 1907 - DNA, 472 bp, homo sapiens
aaaatattagaaaggcacagtaagtgacaccaagattaataagacaaataggtatggcagaaacagagaggtatatgagctgcatagggatctctgttgataagaatctgtgtagacttttttctccttccttcctttgatctttgatcatgggaagacatggaaaaagaaagctaactacagtgattttgtccactacactgttatttggttaaaaattttagtttcctaatgagtattagcatgtatgagaaattatgggagaaaaaggcgcatcctagaaaaggtgtgcttaattactattggggattggttaacatagcatgggagctggattgtcagagattcattatctagaaaatggcaacaagagtttataaaacgaacttctgtgagattactttttagctagcaaagacaaagatgtccttcagtaggtgaagtgataaactatgatacatccagatgatgg

SEQ ID NO: 1908 - DNA, 483 bp, homo sapiens
  misc_feature (2)..(4): n=unknown
  misc_feature (444)..(444): n=unknown
ananaatagccatcagaaatgtttccttttgtgttaaaaaaggtgaagttttgggattactaggacacaatggagctggtaaaagtacttccattaaaatgataactgggtgcacaaagccaactgcaggagtggtggtgttacaaggcagcagagcatcagtaaggcaacagcatgacaacagcctcaagttcttggggtactgccctcaggagaactcactgtggcccaagcttacaatgaaagagcacttggagttgtatgcagctgtgaaaggactgggcaaagaagatgctgctctcagtatttcacgattggtggaagctcttaagctccaggaacaacttaaggctcctgtggaaaactctatcagaggggataaagagaaagctgtgctttgtgctgagcatcctggggaacccatcagtggtgcttctagatganccgttcaccggggatggaaccccaaggggcagcagcaaa

SEQ ID NO: 1909 - DNA, 427 bp, homo sapiens
gaaaatgacaggaagtggcatctatgcacccaattcttcaagagcatttcattatgatatgaagacagaagagggaaaactcctcctctcgcaactggattcccacccatcccattctgcagtggtgaactggacttcctatgccagcagtatagaagcgctctcatcaggaaacaaggaatttaaaggcactgtctttttcgatgaattcacttttgtgaagctcacaggagttgcaggaaattatacagtttgtcagaaagatctctgctgtcatttaagctacaaaatgtctgagaacataccaaatgaagtgtacgctctaggggcatttgacggactgcacactgtggaagggcgctattatctacagatttgtaccctgttgaatgtaaacgactaatttaaacattgcggtgctcagctg

SEQ ID NO: 1910 - DNA, 432 bp, homo sapiens
  misc_feature (94)..(426): n=unknown
acacatcaatatgttttctgttttacattgaaattatatgagaatacagagaattgctctgaggattcctgtttctaaatacattatgggcttncttattnnctattangtcttgaaaaaaagcnaatgtcagntaatgtcacccaaaagaacaagggattntacncaaatatttcttggatgatatagtactttttaggacaaacatctgccacnaaaatgtttgnctcaaaatgatgttttgctngcatagntcactactgcnagtgccttgctctcctgtgcagaagggcangctttgcacagtgcatggctgttatcggnactatgtaattgtccatcatcacagcactatgntattagtgctcagagtctatcagtcagttgggaganattttggcttaaangatgntgttttcactgagntgtgta

SEQ ID NO: 1911 - DNA, 417 bp, homo sapiens
  misc_feature (350)..(372): n=unknown
caggctcgaaaggtccatgctcctttctcctgcccattctatagcataagaagacagtctctgagtgataatcttctcttcaagaagaagaaaactaggaaggagtaagcacaaagatctcttcacattctccgggactgcggtaccaaatatcagcacagcacttcttgaaaaaggatgtagattttaatctgaactttgaaccatcactgaggtggcccgccggtttctgagccttctgccctgcggggacacggtctgcaccctgcccgcggccacggaccatgaccatgaccctccacaccaaagcatctgggatggccctactgcatcagatccaagggaacganctggagcccctgaaccgtccgnagctcaagatccccctggagcggcccctgggcgaggtgtacctgg

SEQ ID NO: 1912 - DNA, 520 bp, homo sapiens
aacacagggtacaaattatttggctcgacttctagtttttgtcttatttcaggcagctctgtccagtggagtgacccgttgccagagtgcagagcaccaccacaaattgacaatggaataattcaaggggaacgtgaccattatggatatagacagtctgtaacgtatgcatgtaataaaggattcaccatgattggagagcactctatttattgtactgtgaataatgatgaaggagagtggagtggcccaccacctgaatgcagaggaaaatctctaacttccaaggtcccaccaacagttcagaaacctaccacagtaaatgttccaactacagaagtctcaccaacttctcagaaaaccaccacaaaaaccaccacaccaaatgctcaagcaacacggagtacacctgtttccaggacaaccaagcattttcatgaaacaaccccaaataaaggaagtggaaccacttcaggtactacccgtcttctatctggttctcgtcctgtcacccaggctg

SEQ ID NO: 1913 - DNA, 60 bp, homo sapiens
atagaagacgggtagtacctgaagtggttccacttcctttatttggggttgtttcatgaa

SEQ ID NO: 1914 - DNA, 525 bp, homo sapiens
  misc_feature (155)..(174): n=unknown
  misc_feature (498)..(498): n=unknown
gaagaagaggtgcaagatacaaggctttagagagcagcataaatgttgacatgggacatttgctcatggaattggagctcgtgggacagtcacctcatggaattggagctcgtggaacagttacctctgcctcagaaaacaaggatgaattaagnnnnnnnnnnnnnnnnnnnntttggtaaggggaattgaggacactgatatgggtcttgataaatggcttcctggcaatagtcaaattgtgtgaaaggtacttcaaatccttgaagatttaccacttgtgttttgcaagccagattttcctgaaaacccttgccatgtgctagtaattggaaaggcagctctaaatgtcaatcagcctagttgatcagcttattgtctagtgaaactcgttaatttgtagtgttggagaagaactgaaatcatacttcttagggttatgattaagtaatgataactggaaacttcagcggtttatataagcttgtattccttttnctctcctctccccatgatgtttagaaa

SEQ ID NO: 1915 - DNA, 620 bp, homo sapiens
  misc_feature (583)..(592): n=unknown
cttacagtaataaatataatgcagtcttcttaagagtcagtttggagttgagaaggcagtgtacccttgatggaaacagtcagactggtggtaccatcttcttcagaactgcatctaagaggctgtgctggctgggaatcatacagctgtgggcaacaactgcatcagccccaaggcttccctccagaccaaaaggtgattcatggcccctggttaatatcaccctaggttctcccctgtcccagttttaacataatatttcatagaaatactagtgccataaaaagtcaatatttcaaatataaaaattattttatacaaatgtaattcataatcattcttttaaaatacagcattgttatatatgtttgaaacattattaaaataaatatttcctagagaaaaaattttgcttcacaaaattataaaacagaagcatataaaactaattcatgattggtgcttcttcagtgtgtctctcattctctcttagtgtagacagcatgaagtacatacatctaagcctgaaaacataccaccatcaacctatacatctaaatgcttggacttcatgtgggtctanccacagtgnccatggcctatctacttacacaccctct

SEQ ID NO: 1916 - DNA, 498 bp, homo sapiens
aacccctgcaatagctgggtttacagacatttaccacctgcggacccaaaagagaaggcctaggagagttttctagaaggttgggattgtcagggtcctggcccctcagaactggcttgatcaagggccttatgtggagcagaggttgtctctgaaccaggagagaaggtactatacctttcaaatccccagggcagacacacccccacccagcccctatttggacctaaactgtgccatttgaacagtcacttccaagctcagtctaaatgaaaccgaaacgtgaccacgcacaaaggcagtcactgcctcgaggggtgcagaccgcagaattttcacagcaggggctcttggaaccctggaaacccccttcttaaatttgggaggaggagtatgcctttggtgtccccctcccaaggggcaattctgaaccccatctttggcaggcatacatatttcactgttttccaagctatctactctgcccaaacaacaccc

SEQ ID NO: 1917 - DNA, 537 bp, homo sapiens
  misc_feature (234)..(234): n=unknown
  misc_feature (338)..(537): n=unknown
attattacacaggtactcgcagagctatgctctgcacacagagccagggctggctgggcgagagggctctgattggagacaggtgccttggggagagttgaggaacgacttccttccaggcggggcctggggacttggtctgcctgtgtctttggtctagaatttggtctgagaatcttataagaagaggccttcctcaggccatgtccagaatgttgcaatttgcctaccaanccaaaatactgtggcctttcacccagggagcccccgctggggagatggaaactgaaatgaccacaaatgcccaggtagccactgcgtgccaagtcccctcttcngcacgtgcnacctgccctcaatcattgacagtggntagtttactaaagttatataagacaaaggaaaacaggtcacaatgctactncataaaatcngggacaaaacagtnnaatcaaatcagacacaaacggcaaccataaatacatagaacaacaggaacaagatagaatcgttgagagtttggaatnggctgggtgn

SEQ ID NO: 1918 - DNA, 516 bp, homo sapiens
  misc_feature (468)..(468): n=unknown
tccggctgtatatccatgagcgccgctggcagccggggagctgcaggaaccagactgggggcgagctgagcacctgtagtcaatcacacgcagcttttaggtttgtttgaataagagatctgacctgaccggcccaactgtacaactcttcaaggaaaattcgtatttgcagtgggaagaataagtaacattgatcaagatgaatgccatgctggagactcccgaactcccagccgtgtttgatggagtgaagctggctgcagtggctgctgtgctgtacgtgatcgtccggtgtttgaacctgaagagccccacagccccacctgacctctacttccaggactcggggctctcacgctttctgctcaagtcctgtcctcttctgaccaaagaatacattccaccgttgatctgggggaaaagtggacacatccagacagccttgtatgggaagatgggaagggtgangtcgccacatccttatgggcaccggaagttcatcactaatgtctgatg

SEQ ID NO: 1919 - DNA, 422 bp, homo sapiens
  misc_feature (280)..(308): n=unknown
tacttggcttaaaagcaaccagatgctgaaactggacagagggcaagaactctgtcacttgtcaccatgcctaacaatgcaatggagaaaaccagtaactaagcacaaaaatagcctggagctcccaggaagagctgcctactccgagacaggtgtgcatggtgggtgccccctgctgatggtgtgaggtcagatccaggtcactgagggagatgggagacctgaaacagggggtgaggggacgcagcttccagaggagggctgctggagcgtgccagantccggaggcctcactccaggtcggcctncacctgctccgtgtcagagcactgcaacttgttacgctcccattggcaaatggcgttggcgtactccaacaacagcttatccatccatgtcaggggctcggggaacagcacaga

SEQ ID NO: 1920 - DNA, 399 bp, homo sapiens
  misc_feature (2)..(2): n=unknown
  misc_feature (375)..(375): n=unknown
cnggcctccagggccgcaccctcatgacagccttactgtacccggtctaggtagactcctacgggaaatgcctgcagaatcgggagctgcctaccgcgcggctacaggacacagccacggccaccaccgaggatccagagctcttggctttcttgtcccgctataagttccacttggccctggaaaatgccatctgtaacgactacatgacagaaaaactgtggcgtcccatgcacctgggcgctgtgcccgtgtaccgggttctccctctgtgagggactggatgccgaacaatcatccgtcatcctgattgatgattttgagtctcctcagaagctggcagagtttattgactttctggacaagaatgatgangagtatatgaaatacctggcatac

SEQ ID NO: 1921 - DNA, 309 bp, homo sapiens
  misc_feature (265)..(265): n=unknown
tgaaggtctgtcttccctcttgttcttttcaaatgttttgcttctccaccaacgtaacaatttataaagcaagagatgagaaaaagagattattgggaaatgtactgaataatgaggagtctggggaatagaacaaaagttgtaagtcgtaacctgacccatcttacttcactggtaatcaagtacagtcgaaaggatgaaataaagaagtgagtagtttaaaaactctgttggaccagcaccttgaatcaaatggatgttttangggtctgttcccactgacccagattggatccctccatctctcct

SEQ ID NO: 1922 - DNA, 544 bp, homo sapiens
  misc_feature (90)..(90): n=unknown
  misc_feature (542)..(542): n=unknown
cttggttgtcagcagcagcaggaggaggcagagcacagcatcgtcgggaccagactcgtctcaggccagttgcagccttctcagccaaangccgaccaaggaaaactcactaccatgagaattgcagtgatttgcttttgcctcctaggcatcacctgtgccataccagttaaacaggctgattctggaagttctgaggaaaagcagctttacaacaaatacccagatgctgtggccacatggctaaaccctgacccatctcagaagcagaatctcctagccccacagacccttccaagtaagtccaacgaaagccatgaccacatggatgatatggatgatgaagatgatgacgaccatgtggacagccaggactccattgactcgaacgactctgatgatgtagatgacatgatgattctcaccagtctgatgagtctcaccattctgatgaatctgatgaactggtcactgattttcccacggacctgccagcaaccgagttttcactccagttgtccccacagtagacacatatgatngg

SEQ ID NO: 1923 - DNA, 391 bp, homo sapiens
  misc_feature (7)..(391): n=unknown
aaagatnatcacaacaaaatatacactaacttaaanaacaaaagattatagtgacataaaatgttatatnctctttttaagtgggtaaaagtattttgtntgcgtctacataaatttctattcatgngagaataacaaatattaaantacagtgatagtntgcanttcttctatagnatgaacatngacatnnccctgnagcttttagtttacagggagnttccatgnngccacnnactnaactaattatccaacacntcngttatntccngnctcaaatngntncacnttccaccnatnaactgagnaagnagcanttcangntctccttcattttgctanaaagcnttttttcttttgncnaaatgccaagtgngaaattgtntttttn

SEQ ID NO: 1924 - DNA, 355 bp, homo sapiens
  misc_feature (181)..(250): n=unknown
atagactgtgagttctgtggtgacagaaaccaagtgtaacctgtttaccatttgattcccagcacctggcatagtgcctgaaatgtactgttcgggggtcttgtctggattttggttgcctcctccaatgttcctctacctcaactacaaggatgggtcatgtttgtgtccgtgacagcgnttttcttttcgctcctctttctgggcatgttcctctctggcatggtggctcaaattgatgctaactggnacttcctggattttgcctaccattttacagtatttgtcttctattttggagcctttttattggaagcagcagccacatccctgcatggatttgcattgcaaatac

SEQ ID NO: 1925 - DNA, 561 bp, homo sapiens
acattccatccatgaaataaaccagaacttgagcttagagtctctctctactaaacacattacttttggaatgtttttgcatctggacaaaatggtatccaaattgatcagacatataaagtagacaagtgaaactaacatacgactgccagtttctaaggagtgttacggtcgccatcttcgtaaagccagacccaaactgcaaccataacaagctgtcgtcataaaggcaaaaattgaggctgctacgtttatgttatactggttatcactcaggagtggctgcccggttatggttgtattgcaatgcaaatcatgcagggatgtggctgctgcttccaataaaaaggctccaaaatagaagacaaatactgtaaaatggtaggcaaaatccaggaagttccagttagcatcaatttgagccaccatgccagagaggaacatgcccagaaagaggagcgaaaagaaaaacgctgtcacggacacaaacatgacccatccttgtagtagaggtagaggaacattggaggagggcaaccaaaattccagacaagacccccg

SEQ ID NO: 1926 - DNA, 316 bp, homo sapiens
gctgttgctacttgccagcttttctttttgccttttgctgatagatggcactttttttgctggcactgttatcaactttattaatagatttaaaagtactgacaatttttcaagccacaaaaggtttaaaaatctttggaacttcttgtcatacttctggttttctgctttcctgaggccgttgtcccatagagtactgtcaatacagtgttgagaagtgaatgggagttaaactagctccctaatatgccatcagtggcttccagtccatttccttgaggggtctaatcttgggctttgggagatacttagagat

SEQ ID NO: 1927 - DNA, 373 bp, homo sapiens
  misc_feature (54)..(353): n=unknown
aggaatttttgtagctcattcatgaactattaatattgtccagagccacggaangtctgacactggcntggaactctctgagaaacaggntgaaancaagcttangaagataantcttcgttgagggctntcngtcttgaaccaacgtttctctttcgcattttctctggagttagctaaaatccgtaaggctanaaagtacaactcaaatccctgngcaaatttcactactcacctgtataaatctcnaagtaatctccccaaagcccaagattanacccntcaaggaaatggactggaagccactgatggcatnctanggagctagtttaactcccattcacttctcaacnctgtattgacagtactctat

SEQ ID NO: 1928 - DNA, 381 bp, homo sapiens
tttgtttttaatctagtttctaggctaactaaatcctttgtcttcaacacaacaatcctttcaacacatgtatctcctacttgttctagccatcttggtaccagttatcactgccacagaaaaaggaacccaagcaagattaaaacttaatttattttgtaagcactaataatgagtaagggaaaataaggaaatttcaagcaagttaaaagaaggcaaattttagttcaatgtatttgaggacagtatatgaaaaatgtgttataatgaagtacctctattattgctatagcacaaagtctgtggagatcatgaaaattaagggttagaaaggtaggttaggtgcataaaccaggtgctaaagaaacaactttttttttt

SEQ ID NO: 1929 - DNA, 467 bp, homo sapiens
  misc_feature (247)..(449): n=unknown
cacaagccaaactttgtcttactccttaaccttgtaaatttctagtaagtagaatcttataatccccagtatataaaggttctagtttttacattgaaatatattttagaacacatttgaattggtcatgtatgttattttacaagaagccattattaccttactatgttttatcaccttccaagaaaaaaaaaagttgtttctttagcacctgtttatgcacctaacctacctttctaacccttanttttcatgagtctccacagactttgtgctatagcaataatagaggtacttcattatnacacatttttcatatactgtcctcaaatacattgaactaaaatttgccttcttttaacttgcttgaaattgccttattttcccttactcatnattagtggcttacnaaataaattaagttcaatcttgcttgggttcctttttcngtggcagtgataactggt

SEQ ID NO: 1930 - DNA, 322 bp, homo sapiens
  misc_feature (7)..(63): n=unknown
  misc_feature (236)..(236): n=unknown
agagaantcagcctggcagagagactctgaaatgagggattagaggtgttcaaggagcaagancttcagcctgaagacaagggagcagtccctgaagacgcttctactgagaggtctgccatggcctctcttggcctccaacttgtgggctacatcctaggccttctggggcttttgggcacactggttgccatgctgctccccagctggaaaacaagttcttatgtcggtgccancattgtgacagcagttggcttctccaagggcctctggatggaatgtgccacacacagcacaggcatcacccagtgtgacatctata

SEQ ID NO: 1931 - DNA, 333 bp, homo sapiens
  misc_feature (31)..(327): n=unknown
gacgcgacgggacgcgctgggaccggcgtcnggggtcgcggggaccatgcagcggaggtgggtcttcgtgctgcacgacgtgctgtgcttactggtcgcctccctgnncttcgctatcctgacnctggtgaacgccccgtacaagcgangattttactgcnnggatgactccatccggtacccctaccgtccagataccatcacccacgggctcatggctggggtcaccatcacggccaccgtcatccttgtctnggccggggaagcctanctngtgtacacagancggctctattctcgtcggacttcaacaactacgttgntgcngtatac

SEQ ID NO: 1932 - DNA, 75 bp, homo sapiens
  misc_feature (5)..(72): n=unknown
acatntnacaanacancaactatntgatgtntcggtnncttccttaaccccataaaaagaaggggatatttnggg

SEQ ID NO: 1933 - DNA, 394 bp, homo sapiens
  misc_feature (363)..(363): n=unknown
gttcctaaagccacctctcagcagaatcgtcatgtttttctgatgcaccgctctgcttcatgcccaagatgacttgcgaggcaatctcaggagctgtggacttaaccattgcaaagcacactgtctttctcagcgttctctgcaagtcagtaggtgttagtatggttgcaaagttcactgtctcagcaaagttgaactgggctacctctctacagctgtttcctcagagggaaaaatcttgagaccagatggtggagctctggagtcagaggaaatgggtgtcttcagcacaaagctgctgcttttacttcagccacttctgacatttttacataccgagcctgagattgtgtgattatctcnaatcaaatcactttgatggagataaataatc

SEQ ID NO: 1934 - DNA, 433 bp, homo sapiens
  misc_feature (303)..(403): n=unknown
ttactaaaagctcagttgtaaccactcctaacaccactagcagaacctcaagggagccaagagctcttcccttttcccctgttaatttccagtataatgtagcagcacaattatttcatgtcacatttaagaagaacaagaaccaatttatataaagtacaattgtatatccttaaacattccacataaacacactgtcaaaactcactggatatgctggaattggaggacttaaatttctacatattatttattgcacccagagtactggttaaaatgcactttctgtgaagatcaaatgcnataacgtatgagggnatttttaacactgtgaagtacacacntaatattataaaatgccatttaattggaaggagtttctatcattgcaagtcataaatgnaactttttaaagatactagcagcttttacc

SEQ ID NO: 1935 - DNA, 520 bp, homo sapiens
  misc_feature (379)..(379): n=unknown
gaaagagataactggaagttccttgattcagaaaacagattcagatgaagaagttgcaatgctgttggacacagtccagaaagtatttcagaaaatgttggaatgtattgcacggagcttcaggaagcagccggaagaaggcctgcggctgctttattctgttcagaggcctcttcatgagttcattactgctgttcagtctcggcacacagacacccctgtgcaccggggtgtactttctactctgatcgctgggcctgtggttgagataagtcaccagctacggaaggtttctgacgtagaagagcttacccctccagagcatctttctgatcttccaccattttcaaggtgtttaataggaataataataaagtcntcgaatgtggtcaggtcatttttggatgaattaaaggcatgtgtgggcttctaatgatattgaaggcattgtgtgcctcacggctgctgtgcatattatcctggttattaatgcagggtaaacataaaagctccaaagtga

SEQ ID NO: 1936 - DNA, 558 bp, homo sapiens
  misc_feature (507)..(554): n=unknown
attacatatataaaagtcattttaaaaacaaccaggtttgctagaaaagtgttttttcttggaatcatggatttctacaccatttatacctggagtcctttatattaaatatattatttacgcaggcactaggcaaaattgaagaagttttgagttatctcctccataacccccaccttcccacattcccacaaaaaaatcccaccctttccctattatatgggttattaacattaaaaacaataggaaaatacaggcatttcaatttgaatcacttttccctatttttacatgtctggagatgttggcttggttatgaattcaaaagttctcccagagttcttgatgatgattcatagagaaatctttcaatgctatcctcttccaaagtaatttccatgaatgtctttagttttctgtgaacagtggctgcaacctccctcacttttgagcttttatgtttacctgcattaataaccaggataatatgcacagcagccgtgaggnaacacaaatgccttcaatatcattagaaggccacacatgcctttaantcat

SEQ ID NO: 1937 - DNA, 466 bp, homo sapiens
  misc_feature (369)..(424): n=unknown
gccggacccgctggaccccctggccccattggtaatgttggtgctcctggagccaaaggtgctcgcggcaggctggtccccctggtgctactggtttccctggtgctgctggccgagtcggtcctcctggcccctctggaaatgctggaccccctggccctcctggtcctgctggcaaagaaggcggcaaaggtccccgtggtgagactggccctgctggacgtcctggtgaagttggtccccctggtccccctggccctgctggcgagaaaggatcccctggtgctgatggtcctgctggtgctcctggtactcccgggcctcaaggtattgctggacacgtggtgtggtcggcctgcctggtcaganaggagagagaggcttccctggtcttcctggnccctctggtgaactggcaaacaangtccctctggagcaagtggtgaaacgtggtcccctggtccat

SEQ ID NO: 1938 - DNA, 515 bp, homo sapiens
ttggtcaaagataaaaactaagtttgagagatgaatgcaaaggaaaaaaatattttccaaagtccatgtgaaattgtctcccattttttggcttttgggggggttcagtttgggttgcttgtctgtttccgggttggggggaaagttggttgggtgggagggagccaggttgggatggagggagtttacaggaagcagacagggccaacgtcgaagccgaattcctggtctggggcaccaacgtccaagggggccacatcgatgatgggcaggcgggaggtcttggtggttttgtattcaatcactgtcttgccccaggctccggtgtgactcgtgcagccatcgacagtgacgctgtaggtgaagcggctgttgccctcggcgcggatctcgatctcgttggagccctggaggagcagggcttcttgaggttgccagtctgctggtccatgtaggccacgctgttcttgcagtggtagtgatgttctgggaaggcctcggtggacatcaggcgc

SEQ ID NO: 1939 - DNA, 415 bp, homo sapiens
  misc_feature (112)..(112): n=unknown
  misc_feature (306)..(343): n=unknown
gttccccgcgggcccccccagccacagcctcctccggctccccctgctgcagttgctgctactggtggtgcaggccgtggggagggggctgggccgcgccacccggccgggnggccccctggaagatgtggtcatcgagaggtaccacatccccagggcctgtccccgggaagtgcagatgggggattttgtgcgctaccactacaacggcacttttgaagatggcaagaagtttgattcaagctatgatcgcaacaccttggtggccatcgtggtgggtgtggggcgctcatcactggcatggancgaggcctcatgggcatgtgtgtcaacgagcggcgancctcattgtgcctccccacctgggctatgggaacatcggcctggcggggtcattccaccggatgccaacctc

SEQ ID NO: 1940 - DNA, 498 bp, homo sapiens
  misc_feature (32)..(32): n=unknown
  misc_feature (313)..(313): n=unknown
  misc_feature (476)..(492): n=unknown
accagtttagcctttgagtgtgcagagctctnccctccctcccacccctcagccccaaatccaagatttcatagccctaacacccacccaagcagcttccctcacacatgccctttgttttcttcctctcttctatggttccttagggaaagccttctttagggatgaaaagctaactacagcccagtctggcctccagcagcccagggtcagctcagcctccactggaggcgagggaggagggcaaagggcatgggagaggtagggctgccctccaggagccttccccttccctaggagccagtcaggattngggaggaaggcagaggggtcctagccagctgtcacatagaggaataggggctgggagtggggatgacaagaagtaccaagaaagagaaagtttggggagatggataacaaactcagctgtgtcagtgatgtggacgggaggtatggtggggggcaaccatggncctatccaaccccagntccaca

SEQ ID NO: 1941 - DNA, 253 bp, homo sapiens
  misc_feature (119)..(119): n=unknown
aagaatctttttggctgttagatgctcttgttggaagaatactaccagattactacagcccggccatgctgggcctgaagaccgaccaggaggtcctcggggagctggtgcgggcgaantgccggctgtgggggccctgatggagcgtctcggtgtgctgtggacgctgctggtgtcccgctggttcatctgcctgtttgtggacatcttgcccgtggagacagtgcttcggatctgggactgtttgtttaac

SEQ ID NO: 1942 - DNA, 458 bp, homo sapiens
  misc_feature (137)..(288): n=unknown
  misc_feature (450)..(450): n=unknown
tttatatattattgatctctcaggtaaaaataagttttctttaaaaagtatgacttcatagctaatcatcaaaagctggtagaatgacctgattttaaactgctcttttaaaaaattcacaactaaagtgtagtgangtcaagtatttacaacactaaaaaggnaagcagtgaaagttggtccagtgtcaactctggnaaggggcatcgtcagtgtagagacgagcaacgcaggggacaggcacgctcacccctgtgccagcagccgggccctgcagctctcgcggancttggcgacggtggccatggataagcttccaggttctgaaaatattttctgcataaacgtgtgacactccatcacgaaactccctttggttatctgcttaaacttatcgcaaatgtctggaacgctggtggcttccaaaatcaactcctggtgctgcttaantaaggtca

SEQ ID NO: 1943 - DNA, 418 bp, homo sapiens
accagatcatcactgccctggaggaggatggcacggcccagaagatgcagctgggctatcggctccagcagattgcagctgctgtggaaaacaaggtcacagatctataggaacccaggagccacggcctgctgttgcttcagcctggcctgggcagccctggaagctcggaggagaggccaccttcttaggtgcctgtagtgactgacaagcagagttagtggaaggtgactcccagtctcctggtggctctggcctcggccctgctggatccacctcctagacccggggcctcaaggctcatggggtagtacccagccttgctccccgagtccagcgaccctgtgacaccggtcttcaaggagttgggggactaagggcttccagagagtggctgggaagagaatccaaggcccct

SEQ ID NO: 1944 - DNA, 461 bp, homo sapiens
  misc_feature (133)..(168): n=unknown
  misc_feature (458)..(458): n=unknown
ctctccccaagacccccctggcagcagatagccctcaccatggctacctatgaggcagggcagccctgtggcagccagccctgctgaggggtcagtttgtagtggcctaggagaggcgttcaactcttagacntaggatgtggcagcagcaacaaggccagaggcagntcaactgaggtcagggatggtggaggaggcagacaggaagcatggggctctcctccttcctctccgaatcccagtgtggccaaggccagtgttcaggaacagtacagtctccccaggggcctggagtctcttccagccactctctggaagcccttagtccccaactccctgcagaccggtgtcacagggtcgctggactcggggagcaggctgggtactaccccatgagccttgaggccccgggtctaggaggtggatccagcagggccgaggccaagagccaccagganact

SEQ ID NO: 1945 - DNA, 466 bp, homo sapiens
  misc_feature (365)..(365): n=unknown
gcctgaccatgtccttctcctttgcaggcaatgctatcacaacaattctctagagacccagagctccccaaaaatgaactttactgacttcttctctcactggacagtgctgaattatctaggtcatttgttattcttttgtccatgaacaccattacctattaagtgtccatttccttaccactcagccaggtggtaaagatagttattaatgtatacacattaatgtgtaataatgacatagtgtcttatcttcatacctttacaaccataagataatatgtcagcatttcagaaaggaccatccaaaccttaacgcaaaatatgggcattgcaactggtaatatgctggtaaggaagatgtntggagaaggagggccttcagggtcctggctaaataatgccctatatgaagctggcctacctcctactccttggtctattcctggtcacatgtactgatttt

SEQ ID NO: 1946 - DNA, 486 bp, homo sapiens
  misc_feature (473)..(473): n=unknown
cgctctttaagcaaacagagcctgccctataaaatccggggctcgggcggcctctcatccctgactcggggtcgcctttggagcagagaggaggcaatggccaccatggagaacaaggtgatctgcgccctggtcctggtgtccatgctggccctcggcaccctggccgaggcccagacagagacgtgtacagtggccccccgtgaaagacagaattgtggttttcctggtgtcacgccctcccagtgtgcaaataagggctgctgtttcgacgacaccgttcgtggggtcccctggtgcttctatcctaataccatcgacgtccctccagaagaggagtgtgaattttagacacttctgcagggatctgcctgcatcctgacgcggtgccgtccccagcacggtgattagtcccagagctcggctgccactccaccggacacctcagacacgttctgcagctgtgcctcggntcacaacacagat

SEQ ID NO: 1947 - DNA, 503 bp, homo sapiens
  misc_feature (206)..(218): n=unknown
  misc_feature (436)..(481): n=unknown
tcaaagtcagagcagtcaatctgtgttgtgagccgaggcacagctgcagaagcgtgtctgaggtgtccggtggaggtggcagccgagctctgggactaatcaccgtgctggggacggcaccgcgtcaggatgcaggcagatccctgcagaagtgtctaaaattcacactcctcttctggagggacgtcgatggtattaggatagangcaccaggngnncccacgaacggtgtcgtcgaaacagcagcccttatttgcacactgggagggcgtgacaccaggaaaaccacaattctgtctttcacggggggccactgtacacgtctctgtctgggcctcggccagggtgccgagggccagcatggacaccaggaccagggcgcagatcaccttgttctccatggtggcattgcctcctctctgctccaaaaggcgancccgaatcanggattaaaaggccgnccgaagccccggatttatanggcaggtctgtttgcttaaaga

SEQ ID NO: 1948 - DNA, 382 bp, homo sapiens
  misc_feature (63)..(63): n=unknown
  misc_feature (377)..(377): n=unknown
acacgctgtagctgtctccccggctggctggctcgctctctcctggggacacagaggtcggcnggcagcacacagagggacctacgggcagctgttccttcccccgactcaagaatccccggaggcccggaggcctgcagcaggagcggccatgaagaagctgatggtggtgctgagtctgattgctgcagcctgggcagaggagcagaataagttggtgcatggcggaccctgcgacaagacatctcacccctaccaagtgccctctacactcgggccacttgctctgtggtggggtccttatccatcccactgtgggtctcacagctgcccactgcaaaaaaccgaatcttcaggtcttcctggggaagcataancttcg

SEQ ID NO: 1949 - DNA, 327 bp, homo sapiens
  misc_feature (199)..(312): n=unknown
tgctattccatgtatgtcataggtgtgaaaccttaaatctttccaacagccactgccttatggagactgtatcatccttatcttcatcttacaggtgagaaatctgcagtgaagaaaggtacatcccaaggggacaccgacagtaagcagcggatctgggattccagacacgtggctgggcctctgcaggaagaaatcnaacgtgtggaanggttggggagannagatgcctagaanggattttcctgnattctcttantggtnngggtaagaccgaggacccaagtcntcactcatcacgtcctcnccagnggtgcaaggatggag

SEQ ID NO: 1950 - DNA, 486 bp, homo sapiens
  misc_feature (411)..(411): n=unknown
gccagactccacagggagcggatgggggggtcagcctgcttgctttgcaccctgtctgtaaccctgccagcagcccgtgggctctgtgcaatggaagtgagactctgggaggttaagtaaccaacctcagcacgtagccaggaagtggcagatcctggatcccagctttctccaactccacagctctttccaccccatcctgcagtcctgtgctgacccaacgttctttagccgggttgggagaaagaacatcggtagctgtcttcccgccttgggccttgtctcctaggatctggaagtgttcagggggacatccaatcagtggcagcctccctcccaaaggtggtggaagtccccatttgctggggaaaaccctgtttcttgggaaagcaccggcagaggctggccgtnggctactgtgccaacccaggggagtgcatgtggctctgctgggatcagcaataaggctcgtggtcctcactgggt

SEQ ID NO: 1951 - DNA, 358 bp, homo sapiens
ctagaaacagaggggactgtgacctggggactttttctgcaggaagaaaacagcccaaagatgagagtgattcgcgtgggtacccgcaagagccagcttgctcgcatacagacggacagtgtggtggcaacattgaaagcctcgtaccctggcctgcagtttgaaatcattgctatgtccaccacaggggacaagattcttgatactgcactctctaagattggagagaaaagcctgtttaccaaggagcttgaacatgccctggagaagaatgaagtggacctggttgttcatccttgaaggacctgcccactgtgcttcctcctggcttcaccatcggagccatctgcaagcggga

SEQ ID NO: 1952 - DNA, 520 bp, homo sapiens
  misc_feature (390)..(427): n=unknown
attcaaaggctgttgcttggacttctctaaagagatgaagcccccacatactgaggaggcaaggcagtcatcaaggccccaaggtgaggcaaatccctggaaggcttgaaccctgcagttcagtctcccggggtaatcactccccagatagcagtgagaatggggcactgaggcccgggatgtaggcactggacagcagcaacccaggcatctgtgccccacaaaccagttaatgggcatcgttaagctgccgtgcaacatccaggatgtttttggctcctttgctcagcaacaagttggccaggctgatgcccaagttctgggcagccaactggggccctcgtggaatgttacgagcagtgatgcctaccaactgtgggtcatcctcanggccatcttcatgctgggcanggacatggatggtaanctgcatggtctcttgtatgctatctgagccgtctagactccagactcctccagtcaggtacagttgcccatccttcatagtgtatgcacgggc

SEQ ID NO: 1953 - DNA, 231 bp, homo sapiens
agtcactggattttgctgcctgatacgtgaatcttcttggaatttttctcatgtggatctaaggggaatgctttattatggctgctgttgtccaacagaacgacctagtatttgaatttgctagtaacgtcatggaggatgaacgacagcttggtgatccagctatttttcctgccgtaattgtggaacatgttcctggtgctgatattctcaatagttatgccggtctag

SEQ ID NO: 1954 - DNA, 560 bp, homo sapiens
  misc_feature (277)..(277): n=unknown
  misc_feature (429)..(517): n=unknown
tgcgcccgcggctgacaccttcgctcgcagtttgttcgcagtttactcgcacaccagtttcccccaccgcgctttggattagtgtgatctcagatcaaggcaaaggtgggatatcatggcatctatctgggttggacaccgaggaacagtaagagattatccagactttagcccatcagtggatgctgaagctattcagaaagcaatcagaggaattggaactgatgagaaaatgctcatcagcattctgactgagaggtcaaatgcacagcggcantgattgttaaggaatatcaagcagcatatggaaaggagtgaaagatgacttgaagggtgatctctctggccactttgagcatctcatggtggcctagtgactccaccagcagtctttgatgcaaagcagctaaagaaatccatgaagggcgcnggaacaaacgaagatgccttgattgaaatcttaactaccaggaccaagcaggcaatgaaggatatctctcaagcctattatacagtatacaagaagagtcttggagatgacattagtttccgaaacatct

SEQ ID NO: 1955 - DNA, 522 bp, homo sapiens
  misc_feature (232)..(314): n=unknown
  misc_feature (429)..(517): n=unknown
atttaatggattagaactataaagattcttaactttgaaagcagaaatataagttggatagtagttgcagatctttaataccattttcaatttcatttatgagctgctacattataaatgagatgctctaaaataataatcgcttttgttgttgttgttatagaacaatgaaaattcctgttcggaacacaagttgctgtttatatttgcttgttctcttaaatagtatganaagaagtaaggtggagctgttgggaaagcccatcgtggacctttggagattatcttcttggttcagtcatctccaccacagntttttaagagtgtgatttcatagtctccagaagtatccgatttaattgctgagtatagggaatagccataatgcttcttgaactctgttcgaatgtccaaaaggtcaatttctgntctggncaccattattcggttcagagtaaactcatcaggttccaatacccttcaaggctcgatgcagtctttcgggctaaaaaggccngcgtg

SEQ ID NO: 1956 - DNA, 458 bp, homo sapiens
  misc_feature (220)..(220): n=unknown
cctcttccacccctgccaggcccagcagccaccacagcgcctgcttcctcggccctgaaatcatgcccctaggtctcctgtggctgggcctagccctgttgggggctctgcatgcccaggcccaggactccacctcagacctgatcccagccccacctctgagcaaggtccctctgcagcagaacttccaggacaaccaattccaggggaagtggtatgnggtaggcctggcagggaatgcaattctcagagaagacaaagacccgcaaaagatgtatgccaccatctatgagctgaaagaagacaagagctacaatgtcacctccgtcctgtttaggaaaaagaagtgtgactactggatcaggacttttgttccaggttgccagcccggcgagttcacgctggggcaacattaagagttaccctggattaacgagttacctcgtccgagtggtgag

SEQ ID NO: 1957 - DNA, 563 bp, homo sapiens
  misc_feature (542)..(546): n=unknown
tcagcggggtggcctggggagcagctgcatgggtggcactgtggggagggtctcccagctccctcaatggtgttcgggctggtgcggcagctggcggcacctgtgcactcagccgtcgatacactggtcgattgggacagggaagacgatgtggttttcagggaggcccagagatttggagaagcggatgaagttctcctttagttccgaagtcagctccttggttctcccgtagagggtgatcttgaagtactccctgttttgagaaactttcttgaagaacaccatagcatgctggttgtagttggtgctcaccactcggacgaggtaactcgttaatccagggtaactcttaatgttgcccagcgtgaactcgccgggctggcaacctggaacaaaagtcctgatccagtagtcacacttctttttcctaaacaggacggaggtgacattgtagctcttgtcttctttcagctcatagatggtggcatacatcttttgcgggtctttgtcttctctgagaattgcattccctgccaggnctancacataccattcccctg

SEQ ID NO: 1958 - DNA, 480 bp, homo sapiens
aagaatttgatgccctgactcctgtgattgaatccagcctccatcaagtggaaagcatgcacggagcagggaatgccaagaagaattggcaacgcattcaggagcatttcttttttgcaacatttcacccactcaaggattattgtctagaggcagtgtctggcttgtaaacaatggaagggaatatttaactctaaacagaaatctgttctgacattaaaaggaaatgagtgagaacatttgtgcagaccatattttacatccttccacgcctttcaggccttattgaagatgaatggatcaccattgataaatttaccagattcactgatgttcctttagctgcgggatttcagtggtacctttctcaaactcaacttagtaaactaaaaccaggtgactggtctcagcaagacataggtactaatttggtcgaagcagataaccaagcggagtggaccgacgttcagaagaagatta

SEQ ID NO: 1959 - DNA, 547 bp, homo sapiens
aaaagtgtttattaaaggggaaaatatatagtaatatgtttaaggcacatggcaaacttttggcattaaattgcaagaaaaaagaaatacaaattatcacaataaatttcagaatctgtttctttagtccaaatagttttttttaaaaaagtctgaacagcagcagcagttcactaaggaaggcacatcatggcttggtatctccgtgcgagagcagctgctgcctggtgtactcccagatcagcagggctccactcacatggacattcagggagcggataatgccctgttgaggaatttccacacaaacgtccaactgttggatcagatttgctggaattccctcacgttcatttcccaacaagagcagagatttctcaggaaagcaatattgggttaggtctaaacttttggcagtttgttccactccaatgatggtataaccttctgttttcttctgctgcagataatcaattagctgaggtggtttacctccactagaggaagccactgttctgcagagacactgaggtgctgaaactgtttg

SEQ ID NO: 1960 - DNA, 379 bp, homo sapiens
acagaatatggcaaaaatgagactacttacttttatgggaatggcagtagaaaataaggaaatttcttttgacacaatgcagcaagaacttcagattggagctgatgatgttgaagcatttgttattgacgccgtaagaactaaaatggtctactgcaaaattgatcagacccagagaaaagtagttgtcagtcatagcacacatcggacatttggaaaacagcagtggcaacaactgtatgacacacttaatgcctggaaacaaaatctgaacaaagtgaaaaacagccttttgagtctttctgatacctgagtttttatgcttataatttttgttctttgaaaaaaaagccctaaatcatagtaaaacattataaac

SEQ ID NO: 1961 - DNA, 339 bp, homo sapiens
aagaacaaaaattataagcataaaaactcaggtatcagaaagactcaaaaggctgtttttcactttgttcagattttgtttccaggcattaagtgtgtcatacagttgttgccactgctgttttccaaatgtccgatgtgtgctatgactgacaactacttttctctgggtctgatcaattttgcagtagaccattttagttcttacggcgtcaataacaaatgcttcaacatcatcagctccaatctgaagttcttgctgcattgtgtcaaaagaaatttccttattttctactgccattcccataaaagtaagtagtctcatttttgccatattctg

SEQ ID NO: 1962 - DNA, 383 bp, homo sapiens
  misc_feature (356)..(356): n=unknown
aagccgctagctccgctgggacagaggcttgagagaactaacggctcggtgccttctccctggtctcagaccatcgtctctgcactgcgaaggcatttggtagcctcaccactgagatactaactagacctagactaggagctttatcaggttctaggaggtcctttaggaagactctcaaaggcaaatccctgatcccccgccccacccttagccctgccctctcaccagagcaaaattcactggggacttttcccaccacacatggaaatctgtccactcggaatacctctgttttccatttcaaattgtagggggaagggatggaacacttccagtgatggtaagagatctgntatgaaacgaacaccccccgtgttaat

SEQ ID NO: 1963 - DNA, 535 bp, homo sapiens
  misc_feature (442)..(444): n=unknown
gaaatgcagtacttgcttccagtaattgtattgtaatgtgagaaggtggtagcactaatggttgaatacaagagttaaactaatccacaccagctcaaaaaacctgtggagatttagttgaataagaatggacgcccacagtgattctcaaccaattacaaattttcacagaacacagtaaaactaaaagggtaactatgagagtcaatacaagtatactagaggcacagggggcccggctcataaaaacagatttcagaccaagttattaacacggggggtgtttcgtttcataacagatctcttaccatcactggaagtgttccatcccctccccctacaatttgaaatggaaaacagaggtattccgagtggacagatttccatgtgtggtgggaaaagtccccagtgaattttgctctggtgaaaaggcaaggctaannnttgggccggggatcagggatttgcctttgagagtcttcctaaaggacctcctagaacctgataaagctcctagtctaggtctagttagtat

SEQ ID NO: 1964 - DNA, 326 bp, homo sapiens
  misc_feature (21)..(296): n=unknown
gccaagggccacctaccaggnagccaccacgtcggacatcttctcacttgcngtccagccctgcagccggggactttnccatcctancnnnccctganancnccccgcnactggcccctnanaccccggacgangcancntcagtagctgctgactcanatgtccaantncctggncctgcagcaagccctaagcctttngnccggctccggccaccccgcnanancaaggtaanccggagattgccgggtgcnaggcctgatgctgggatgggaccaccttcagctgtggctganaggcccaatgtcagcctgcattttgacact

SEQ ID NO: 1965 - DNA, 115 bp, homo sapiens
  misc_feature (16)..(109): n=unknown
gagtggcagcctcganggtctgggacactcagcaganactggaaatggcagttgtgactgggctgaggccttgtngggggaccanggcaggncctgggacaccnaaggnggtgag

SEQ ID NO: 1966 - DNA, 445 bp, homo sapiens
gaccctagggagtggtttatgggggctagctggtgaaactgccctttcctttctgttctatgagtgtgatggtgtttgagaaaatgtggggctatggttcaggcgcacttcacatgtgcaaagatggagaaagcactcacctacacgtttaggctcagaatgttgattgaaacattttgaatgatcaaaaataaaatgttatttttaaagtttctctttgagattttgcttaagttttggtagatattcttaagttttagtgacctcagtttgggaattaagtaagctaaacattgtgtccttattattagttatataaaactatgctttagactttgttagaaacttctgccccaccttgactgactgcttttccatttctggttgtacaaaatgaattcacactttaatgctatggccacctttaaataaagtacagcgtgac

SEQ ID NO: 1967 - DNA, 414 bp, homo sapiens
  misc_feature (124)..(124): n=unknown
  misc_feature (252)..(374): n=unknown
aaagtgtgaattcattttgtacaaccagaaatggaaaagcagtcagtcaaggtggggcagaagtttctaacaaagtctaaagcatagttttatataactaataataaggacacaatgtttagcntacttaattcccaaactgaggtcactaaaacttaagaatatctaccaaaacttaagcaaaatctcaaagagaaactttaaaaataacattttatttttgatcattcaaaatgtttcaatcaacattcngagcctaaacgtgtaggtgagtgctttctccatctttgcacatntgaagtgcgcctgaaccatagccccacattttctcaaacaccatcacactcatagaacagaaaggaaagggcagtttnaccagctagcccccataaaccactccctagggtcctcgag

SEQ ID NO: 1968 - DNA, 385 bp, homo sapiens
caagaggctgccagtgggacattttctcggccctgccagcccccaggaggaaggtgggtctgaatctagcaccatgacggaactagagacagccatgggcatgatcatagacgtcttttcccgatattcgggcagcgagggcagcacgcagaccctgaccaagggggagctcaaggtgctgatggagaaggagctaccaggcttcctgcagagtggaaaagacaaggatgccgtggataaattgctcaaggacctggacgccaatggagatgcccaggtggacttcagtgagttcatcgtgttcgtggctgcaatcacgtctgcctgtcacaagtactttgagaaggcaggactcaaatgatgccctggagatgtcacagattct

SEQ ID NO: 1969 - DNA, 457 bp, homo sapiens
  misc_feature (13)..(13): n=unknown
  misc_feature (398)..(398): n=unknown
ggctcagcctagngggaataattgccaacaaacacttttgggaagcctgggaccatggctctgccaggaatctgtgacatctccagggcatcatttgagtcctgccttctcaaagtacttgtgacaggcagacgtgattgcagccacgaacacgatgaactcactgaagtccacctgggcatctccattggcgtccaggtccttgagcaatttatccacggcatccttgtcttttccactctgcaggaagcctggtagctccttctccatcagcaccttgagctcccccttggtcagggtctgcgtgctgccctcgctgcccgaatatcgggaaaagacgtctatgatcatgcccatggctgtctctagttccgtcatggtgctagattcagacccancttcctcctgggggctggcaagggccgagaaaatgtcccactggcagcctcttgtcgag

SEQ ID NO: 1970 - DNA, 271 bp, homo sapiens
  misc_feature (47)..(258): n=unknown
gccgtgccgggcgccatcatggacgaggactactacgggagcgcggncgagtggggcgacgaagctgacggcggccagcagggaggatgattctgganaangagaggatnatgcggangttcagcaanaatgcctgcataaattttccacccgggattatatcatggaaccctccatcttcaacactctnganagggnntttcaggnangagggtctccanagaangnnatccagcncttatctgaaaactacaccgntgtggcccagact

SEQ ID NO: 1971 - DNA, 492 bp, homo sapiens
  misc_feature (117)..(490): n=unknown
ttgttcttagcaaattaagacaattacaataaaacatcagctaactgggttcttgtgagaaaactgaggtcagcttggaaaggagttccccgagtggagttcccagcggcccgcggntgacggccanatctgtcctnaggggtcgtgggagcccagcgcntgncttgagggaaatgaacactgaaaacaggatttgggancagtattngattgacagcagacaagggactgtttgnaagggcagtttctcactgaagctgctaccattttcctttgtaaagaagtcatccacctcctcccagnggtgcccattttcaagacgctgccagagcctcttaaaacagcttcttgaaanggtttttccacaacgggttctggaatgttctgcttcagctctggangatgctctaaattagttcaccatgatgaanttagatttgcagtgagctataaactccgtcacanggtcatgctcggccttccgttttgntg

SEQ ID NO: 1972 - DNA, 336 bp, homo sapiens
  misc_feature (113)..(113): n=unknown
  misc_feature (241)..(241): n=unknown
gcagagttcgcctgcagacggatctggatatacactatgtataattgttacgtgtaatttaaaatatatctgtttgccatcgtcatgagaagattatatgtaaggctctgaanggagagggagatgtacattctgccaggctcctggggaccttatccgagtcatgaaattgatgactgttgatccagtggtgcaagaagctacactccatgtgtcatcacgcttatgactcctaatgtanttttaaggcaaaaaatgtcagccgactccatcttcacccctcgattcctcgagtccagctttctgtgccagtgcttcactgagccacaacgtctc

SEQ ID NO: 1973 - DNA, 504 bp, homo sapiens
  misc_feature (88)..(88): n=unknown
  misc_feature (268)..(282): n=unknown
  misc_feature (470)..(470): n=unknown
catgagataatgtaccacaaaagagtttgattttacaacataaagtatggtaggaagtggtcaatgtacacagtgttgtcagcaaaanggggaggcagggcagtttcacattttttgaaaggtggtggacgacaactacacttgtccttaaagtaaaataaaagcaggagagacccagcagagaccaacctgatttgcagttagcatcagaatctaaatctagtatcacaactttaagaaactaaaagaaaactattagaaaaatagnacatcnaacaagcnaaaaaatatacaaatgtacataataaaaaacacacaactcttaataatggctccatgttcagtagaagaaaatatttactggagaaaccacagctattcaggttgataataaaccaaccctcattggtatcattacccttagtgctccttaaactcattgaagctgaaaaggcacaacttaagcaggnaacttatcatcttaaatatatattataacttctc

SEQ ID NO: 1974 - DNA, 503 bp, homo sapiens
  misc_feature (7)..(13): n=unknown
  misc_feature (378)..(378): n=unknown
  misc_feature (485)..(493): n=unknown
gtcaganctgganggccgggcaccgcggccatggagggtcaacgctggctgccgctggaggccaatcccgaggtcaccaaccagtttcttaaacaattaggtctacatcctaactggcaattcgttgatgtatatggaatggatcctgaactccttagcatggtaccaagaccagtctgtgcagtcttacttctctttcctattacagaaaagtatgaagtattcagaacagaagaggaagaaaaaataaaatctcagggacaagatgttacatcatcagtatatttcatgaagcaaacaatcagcaatgcctgtggaacaattggactgattcatgctattgcaaacaataaagacaagatgcactttgaatctggntcaaccttgaaaaaattcctggaggaatctgtgtcaatgagccctgaagaacgagccagatacctggagaactatgatgccatccgagttactcatgagaccagtgnccatgaangtcagactga

SEQ ID NO: 1975 - DNA, 558 bp, homo sapiens
gaaaatatcaaaatttttgagttagtgtatggcagagaaaatttagttgcaaataatacagtttttggtgtttccattattgacaagctatgctgcagaaagagcaatcgcattaaatcttagttcatcagggtcgcgctccataaacttcttgcaaacttctatggcatcctctaataaagtttcatcactagtttcaccatggttaattggaaatggcttccgcccatctaattcatagagatgcccatctacatgaactaatgcaataaaatgaagatctactttctcatctatacttggtgcctcagtctgaccttcatgggcactggtctcatgagtaactcggatggcatcatagttctccaggtatctggctcgttcttcagggctcattgacacagattcctccaggaattttttcaaggttgatccagattcaaagtgcatcttgtctttattgtttgcaatagcatgaatcagtccaattgttccacaggcattgctgattgtttgcttcatgaaatatactgatgatgtaacatcttgtccctgaga

SEQ ID NO: 1976 - DNA, 477 bp, homo sapiens
catttttattgccctttctgtgatcaaatcatatttctgtacattttcagtggtagaaaaaaaaggttttaaaaattgtatcctagggaacagtttgccataagtcagaattttgcagtttagctcatagatcttaattggtttttctctaaaatatgaattttataattgaaggaccacaatttgtttaatcaagataggcaacgctgcagttcctttatgaagaggcttttctgtcgtcccaggctagcagagatggatagcttctttgtcagcaatgtgatttcacttattttattgtcttattttaaaccctgtctccatgacttcatttgcactttgacagagcagaggcagagtatttgtcttatatttctcagattataatattaaaaaattaccaatccaatttattttcattaaagaacgtgagctttttagcattcctttctgcttaatccttctttccttaccctt

SEQ ID NO: 1977 - DNA, 513 bp, homo sapiens
acagtaaacaagatttctgtaaaagttaatttatccatagtggtacgtttcataaaaatagttgctcacttacagtctttctgtgactattaatacatggaattatatttatagagatacagctgtacagggtaaattcacagctaacactacacaaatattatttggaatgggatttagatgatgtgctgtcttcacaggttatggattacagccgcataaagcaattactgcacaagtagtagctgtgaactgtgcaaactagagtttatgccagtgtaatctcaatttttttttccttttgtaatacatggaaaataaagtcagaggatacagtaccaggacgtgcagctacactacagaagcattgtccaaaaccagattcaataaattaatggcaaactatactggatttctagtccaggggagaaagactaattgagttaaaccaaaagcattataaactgctacaagtgtttgtgcttttgtttacgatgaatggggttccatttt

SEQ ID NO: 1978 - DNA, 183 bp, homo sapiens
  misc_feature (34)..(34): n=unknown
ccggagagaggcagagaggctggtgcggcaggcnggaggaggaggaggcaccggcagccccaagcttgtggccctgaggctggagatgtcttcgttgcctgacctgacacccaccttcaacaaactctgtggcaactccaggcagatggtttcaccccaatatcatgcctggtgagtatgtcc

SEQ ID NO: 1979 - DNA, 452 bp, homo sapiens
  misc_feature (124)..(343): n=unknown
cttgatagacatctataacgttattattttcagtggtgtgcagcatttttgcttcatgagtatgacctaggtatagagatctgataacttgaattcagaatattaagaaaatgaagtaactgannnnnnnnnnnnnnnnnnnnnnnnntttctacattataactcacagcattgttccattgcaggttttgcaatgtttgggggtaaagacagtagaaatattattcagtaaacaatntntgtgtgaacttttaagatggataatagggcatggactgagtgctgctatcttgaaatgtgcacaggtacacttaccnnnnnnnnnnnnnnnnnnnnnnnnnnncccattcaggaaaacaacattgtgatctgtactacaggaaccaaatgtcatgcgtcatacatgtgggtataaagtactaaaatatatctaactattcataatgtggggt

SEQ ID NO: 1980 - DNA, 496 bp, homo sapiens
  misc_feature (402)..(424): n=unknown
tgtacaaagcagcaactgcaatactcaaggttaaaacattagaaaagcatttgtgtgacaggtatattacagtattatcaaaatattacattttcagacttacttagcagataatcatccaccagagcttaaatctttaaattatttccatagtcttaaaaaatatgtaatgtcagaatgcatataaaaagaatgtaaaaggaaacctaaaatacaaatggaataatgtaacaaataaatatttgatttcagtaactgttaataatcagctcaacaccaccattctctctaaactcaatttaattcttataggaataatgaactgtcaaatgccatggcataattatttatttccaagctatcatcaatgattagaactaaaaaaaatttggcataaaaaantcaccaattcagcntaaatgangctatttttagccttcaacactagctagcatctctaagaattgttgaaataagtactataaccttgaaaatt

SEQ ID NO: 1981 - DNA, 424 bp, homo sapiens
  misc_feature (100)..(100): n=unknown
  misc_feature (327)..(399): n=unknown
ggaagcaggagatgacgagtccaagttagatgatgcacattcattaggctctggtgctggagaaggatacgagccaatcagtgatgacgaactagatganattctggcagtgatgcaagaaaagagggaggaccaacaggatgaggagaagatgccagatcccttagatgtgatagatgtggattggtctggtcttatgccaaagcatccaaaagaaccacgagagcctggggctgcactcttaaaattcacacctggagctgttatgctaagagttgggatttctaaaaagttggcaggttctgaactctttgccaaagtcaaagnaacatgtcagagacttttagaaaaacccaaagatgcagacaatctctttgaacatgaattggggggctctcnatatggctgcattactacgaaaaga

SEQ ID NO: 1982 - DNA, 557 bp, homo sapiens
  misc_feature (394)..(478): n=unknown
cacaatctctgataacaaaaaaagcatttagggtcaaaagacatccaacatacattgtaacaatgcacacatattaattaaaaaaaagacccatgaaataatttttaaaaaactttcaaaaggaaaaaactattttggcttccttctgctgaaattcgcctataaacataccacgccagctagaccagcattccctttcacgtggtctgtacaacatagtactgcacaatgtgagcaattactttgatgaacacattgtttttgaataaaattgttggttctgtatggatgatccagacataaatccatggttccatttcacaaaaatattcataggctggaagagcagtgacaaccattttccaaaatcttcagttttaacaaaaggcgcagnataaactactaaatctagatgttttcacattattttgcatgagtgtcaaatactatgtaaaaattaacgtaaaatcttaagttnggccaaactagtggctccaaagatccaaaattcttcactcttttagcatgggctgataaatcttttctggcctttgtca

SEQ ID NO: 1983 - DNA, 399 bp, homo sapiens
catattcgacctgctgctggactcttataggactgccagggagtttgacaccagccccgggctgaagtgcctgctgaagaaagtgtctggcatcgggggcgccgccaacctctaccgccagtctgcgatgagctttaacatttatttccacgccctggtgtgtgctgttctcaccaatcaagaaaccatcacggccgagcaagtgaagaaggtcctttttgaggacgacgagagaagcacggattcttcccagcagtgttcatctgaggatgaagacatctttgaggaaaccgcccaggtcagccccccgagaggcaaggagaagagacagtggcgggcacggatgcccttgctcagcgtccagctgtcagcaacgcagattgggtgtggctggtcaag

SEQ ID NO: 1984 - DNA, 104 bp, homo sapiens
  misc_feature (97)..(97): n=unknown
ggccgtgaaggtctggtctgggagaatctgaatctgattgagaactgttagcaccatgttggtccatgctgattgtgcttctgcggtctctcaccgngacactg

SEQ ID NO: 1985 - DNA, 430 bp, homo sapiens
  misc_feature (98)..(98): n=unknown
  misc_feature (245)..(400): n=unknown
ccggtcaagctcaaggaactgcacttctccaacatgaagaccgtggactgtgtggagcgcaagggcaagtacatgtacttcactgtggtgatggcagngggcaaggagatcgactttcggtgcccgcaagaccagggctggaacgccgagatcacgctgcagatggtgcagtacaagaatcgtcaggccatcctggcggtcaaatccacgcggcagaagcagcagcacctggtccagcagcagcncccctcgcagccgcagccgcagccgcagctccagccccaaccccagcctcagcctcagccgcaaccccagccncaatcacaacccagcctcagcccaaccaagctcagcccagcagctcaccgtatcgatcanatcactcaattcatctcatgancaacctaccgacgatcgacaatcgacaaca

SEQ ID NO: 1986 - DNA, 342 bp, homo sapiens
  misc_feature (55)..(66): n=unknown
  misc_feature (284)..(290): n=unknown
tgaaagtgtcagactttctgaaagtactcgagaaataatgaataaattcttaatnttttcccctcnaccgcccttttttattctccaagattaggaattactacggattaggtttttgaaaataaagtttcctttttggaaaatggtctacattcagaaatgtcttagaacaagcatttaaaaaaaactaataaataatcataaatcaaaatacattaaaataaaattacagtacatcatcgctcctagaaaattcaccatacaagacgatcctttcaaaggtncataantaaaagtcttcttgactcgaaatcgtttcctgcatcgtgatgaaaaagtatg

SEQ ID NO: 1987 - DNA, 446 bp, homo sapiens
  misc_feature (71)..(71): n=unknown
  misc_feature (369)..(434): n=unknown
ttggtgcattgatgagcaattactctctccccccacccctgcccacctatcatgtcctgctggaggggganggcctgggacagtcactaggcaacttcaaggacgacctgctcaatgtatgcatgcgccacgttgagaagatgtgcaaggcggacctgagccgtaacttcattgagaggaaccacatggagaacggtggtgaccatcgctatgtgaacaactacacgaacagcttcgggggtgagtggagtgcaccggacaccatgaagagatactccatgtacctgacacccaaaggtggggtccggacatcataccagcctcgtctcctggccgcttcaccaaggagaccacccagaagaatttcancaatctctanggcaccaaaggtaactacacctcccgngtctgggagtactcctccagcattcagnactctgacaatg

SEQ ID NO: 1988 - DNA, 416 bp, homo sapiens
  misc_feature (160)..(411): n=unknown
tggatgtctccctccccaacccctgcaagctggcccatccttccagagcccccataggcctggggctgttgagacgggagatgtccccactgtgctgctcctggttttgtctcctctccaatccttgagcaccctgatatgcaacatggggggtaatcanaaggaggaggcagcctctgatggggcaacggctgagggtgggggcagtgtgtaaggcaccttttgcggtcagcccanccacactccatcgccanagagaatgccaaagtgtagactgaatgaaattctgtaggcaaatggnaaatggtanctgggccagtagctatttgcatgggtggattatatcatgttaagggaattctttatctcagcananggaacanaggaatatcttggctaaggtcatcctgncagtc

SEQ ID NO: 1989 - DNA, 170 bp, homo sapiens
  misc_feature (39)..(168): n=unknown
ccggtggacccacggtgcctccctccctgggatctacananactatggccttgccaacngctcgacccctgttggggtcctgtgggacccccgcnctcngcagcctcctgttcctgctcttcagcctcggatgggtgcagccctcgaggaccctggctggagagacangg

SEQ ID NO: 1990 - DNA, 275 bp, homo sapiens
  misc_feature (240)..(240): n=unknown
ctcaggctcccgttcaggatttttagactctgaggagcagttggagctaatccacattatggaaatggaaaccaccgaacctgagccagactgtgtagtgcagcctccctctcctcctgatgacttttcatgccaaatgagactctctgagaagatcactccattgaagacttgttttaagaaaaaggatcagaaaagattgggaactggaaccctgaggtctttgaggccaatattaancactcttctagaatctggctcacttgatggggttt

SEQ ID NO: 1991 - DNA, 419 bp, homo sapiens
gaaactctgagaattttcttcagattcattgagagagttttccataaagacatttatatatgtgagcaagattttttttaaacaattactttattattgttgttattaatgttattttcagaatggcttttttttttctattcaaaatcaaatcgagatttaatgtttggtacaaacccagaaagggtatttcatagtttttaaacctttcattcccagagatccgaaatatcatttgtgggttttgaatgcatctttaaagtgctttaaaaaaaagttttataagtagggagaaatttttaaatattcttacttggatggctgcaactaaactgaacaaatacctgacttttcttttaccccattgaaaatagtactttcttcgtttcacaaattaaaaaaaaaatctggtatcaacc

SEQ ID NO: 1992 - DNA, 381 bp, homo sapiens
agaaagtactattttcaatggggtaaaagaaaagtcaggtatttgttcagtttagttgcagccatccaagtaagaatatttaaaaatttctccctacttataaaacttttttttaaagcactttaaagatgcattcaaaacccacaaatgatatttcggatctctgggaatgaaaggtttaaaaactatgaaataccctttctgggtttgtaccaaacattaaatctcgatttgattttgaatagaaaaaaaaaagccattctgaaaataacattaataacaacaataataaagtaattgtttaaaaaaaatcttgctcacatatataaatgtctttatggaaaactctctcaatgaatctgaagaaaattctcagagttt

SEQ ID NO: 1993 - DNA, 408 bp, homo sapiens
gacatagccaactgggagctctcagtaaaattgcatgataaagttcataccgtagtagcatcaaacaatgggtcagtgttctcggtggaagttgatgggtcgaaactaaatgtgaccagcacgtggaacctggcttcgcccttattgtctgtcagcgttgatggcactcagaggactgtccagtgtctttctcgagaagcaggtggaaacatgagcattcagtttcttgggtacagtgtacaaggtgaatatcttaaccagacttgccgcagaattgaacaaatttatgctggaaaaagtgactgaggacacaagcagtgttctgcgttccccgatgcccggagtggtggtggccgtctctgtcaagcctggagacgcggtagcagaaggtcaagaaatttgtgtgat

SEQ ID NO: 1994 - DNA, 325 bp, homo sapiens
  misc_feature (95)..(95): n=unknown
cgcgtgccgcggcgcctggttgcctgcagcggcccggacccgagaggaagctgaaccatctatctccagaaatgtcttcagaaagtaaagagcancataacgtttcacccagagactcagctgaaggaaatgacagttatccatctgggatccatctggaacttcaaagggaatcaagtactgacttcaagcaatttgagaccaatgatcaatgcagaccttatcataggatccttattgagcgtcaagagaaatcagatacaaacttcaaggagtttgttattaaaaagctgcagaagaattgccagtgcagtccagccaaagc

SEQ ID NO: 1995 - DNA, 288 bp, homo sapiens
  misc_feature (222)..(228): n=unknown
tttttaataacaaactccttgaagtttgtatctgatttctcttgacgctcaataaggatcctatgataaggtctgcattgatcattggtctcaaattgcttgaagtcagtacttgattccctttgaagttccagatggatcccagatggataactgtcatttccttcagctgagtctctgggtgaaacgttatgttgctctttactttctgaagacatttcnggaganagatggttcagcttcctctcgggtccgggccgctgcaggcaaccaggcgccgcggcacgg

SEQ ID NO: 1996 - DNA, 403 bp, homo sapiens
gggaataggtggtctgaacgtggtgtctcactctgaaaagcaggaatgtaagatgatgaaagagacaatgtaatactgttggtccaaaagcatttaaaatcaatagatctgggattatgtggccttaggtagctggttgtacatctttccctaaatcgatccatgttaccacatagtagttttagtttaggattcagtaacagtgaagtgtttactatgtgcaacggtattgaagttcttatgaccacagatcatcagtactgttgtctcatgtaatgctaaaactgaaatggtccgtgtttgcattgttaaaaatgatgtgtgaaatagaatgagtgctatggtgttgaaaactgcagtgtccgttatgagtgccaaaaatctgtcttgaaggcagctacac

SEQ ID NO: 1997 - DNA, 530 bp, homo sapiens
  misc_feature (40)..(260): n=unknown
caatctaaaaaaaaaatcagaatgtgtagaccatacatangagagagggcatccccccaaaatctgatgttaagtgaataaaatcaatnnnnnnnnnnnnnnnnnnnnnnnnnnnnnnnnnnnnnnnnnnnnnnnnnnnnnnnnnnnnnnnnnnnnnnnnnnnnnnnnnnnnnnnnnnnnnnnnnnnnnnnnnnnnnnnnnnnnnnnnnnnnnnnnnnnnnnnnnnnnnnnnnnnnnnnnnnnnnnnnnnnnnnnnnnnntagttatgacaaattttattgtatatattgcaccacattgaaaaaaaatcaacatcatgaatgagattaaaacaaaggtcattttaagagaatatttctcaggccaggaaagacctggttatagcctaattagtagtgatattaacagtaggggactagtcagcatggaaacacacacaaaaaacagagtcacgttgccaggggagatgatcaatctggggactagataattccagtcactttaaaataattttgttacaaagcaggggt

SEQ ID NO: 1998 - DNA, 440 bp, homo sapiens
  misc_feature (348)..(405): n=unknown
ggacggccgtggccaggcctccacaggccgggtgctgctgcccacaggcaaccagagggcagaactgacactggggctgcgggcgcccccgaccctactcagcaccagtagtgggggcaagagcaccatcacccgtgtcaacagccctgggaccctggctcggctgggcagtgtcactcatgtcaccagcttcagccatgccccccccagtagccgaggaggctgcagcatcaagatggaaccagagccagcagagcctctcgctgcagcagtggaagcggccaatggggctgagcagacccgagtgaacaaagcaccagaagggcggagctcctgagcgctgaggantgatgactattgaggatgaaggagcttggacaagatgctggatcagagccacggacntttgaaagagcggaaacttcattccggggcttgca

SEQ ID NO: 1999 - DNA, 135 bp, homo sapiens
accagtccagcagcatctgttgatgtgttggcgttggggacccgaagctggtggatcgtgcacggctgcgcggggtccgccagggttgccggccgcgccctccttctcagttctcaatcatggcttgcgcgcttg

SEQ ID NO: 2000 - DNA, 381 bp, homo sapiens
cggtgaggtcagcttcacattctcaggaatctccttctttgggtctggctgaagttgaggatctcttactctctaggccacggaattaacccgagcaggcatggaggcctctgctctcacctcatcagcagtgaccagtgtggccaaagtggtcagggtggcctctggctctgccgtagttttgcccctggccaggattgctacagttgtgattggaggagttgtggccatggcggctgtgcccatggtgctcagtgccatgggcttcactgcggcgggaatcgcctcgtcctccatagcagccaagatgatgtccgcggcggccattgccaatgggggtggagttgctcgggcagccttgtggctactctgcagtcactg

SEQ ID NO: 2001 - DNA, 532 bp, homo sapiens
gcggtttctgcggcggctggagaggtggtcggagaagtaggaacctcctgccgggctcgtggcggcttctgtccgctccgcggagggaagcgccttccccacaggacatcaatgcaagcttgaataagaaaaacaaattcttcctcctaagccatggcatatcagttatacagaaatactactttgggaaacagtcttcaggagagcctagatgagctcatacagtctcaacagatcaccccccaacttgcccttcaagttctacttcagtttgataaggctataaatgcagcactggctcagagggtcaggaacagagtcaatttcaggggctctctaaatacgtacagattctgcgataatgtgtggacttttgtactgaatgatgttgaattcagagaggtgacagaacttattaaagtggtaaagtgaaaattgtagctgtgatggtaaaaatactggctcaatactacagaatgatagaaaaatatgactttttacaccatcttctgtaatcattgctttgaagaga

SEQ ID NO: 2002 - DNA, 261 bp, homo sapiens
aagtttgatcacagagtgtttgcatattttcttactatttttggtatgatttaaaaattattggttcattaaccatttaaaagaggaataattcagtagaggcactaggaggttgaacaggatcattcttcattaatattcagccttgacaagcacagcggctacaatacccaggaaagtgagcaacaggagaccgagtttttctttgttgaaccgtttcaagagaaaaaattttccccaatccacctttgactggctgtt

SEQ ID NO: 2003 - DNA, 392 bp, homo sapiens
  misc_feature (139)..(139): n=unknown
  misc_feature (365)..(365): n=unknown
cttttgagttcattgaggaagctcaccagtgtgggaaggggcttctcatccactgccaggctggggtgtcccgctccgccaccatcgtcatcgcttacttgatgaagcacactcggatgaccatgactgatgcttatanatttgtcaaaggcaaacgaccaattatctccccaaaccttaacttcatggggcagttgctagagttcgaggaagacctaaacaacggtgtgacaccgagaatccttacaccaaagctgatgggcgtggagacggttgtgtgacaatggtctggatggaaaggattgctgctctccattaggagacaatgaggaaggaggatggattctggttttttttctttcttnttttttttgtagtgggagtaagttttg

SEQ ID NO: 2004 - DNA, 278 bp, homo sapiens
  misc_feature (34)..(258): n=unknown
ttttttgtgaaaaatatttttaaataaatttttnttncttacantcatgatanatatatgtaacaaggtttatggcactgtaaccagaatcaaatcagagaagaaaaaaaaaaaggnaaaaggtgggaangatagtatttgatatattnttgaattcctntctatctccaagctggcaaatttgcactatttgtctatcattcagcngccagctctaacttgtttgcacacttaaaacatcatattattgcacaagangccagtgaaggcatataatg

SEQ ID NO: 2005 - DNA, 61 bp, homo sapiens
  misc_feature (39)..(42): n=unknown
ggatatgtttttctaaaaactcagtgtctgcacaatccnttnatagaactgggaggatgtg

SEQ ID NO: 2006 - DNA, 454 bp, homo sapiens
  misc_feature (89)..(89): n=unknown
  misc_feature (443)..(443): n=unknown
cgacaggcggcgcgggcggcggtaaaatgtcggttccaggaccttaccaggcggccactgggccttcctcagcaccatccgcacctccntcctatgaagagacagtggctgttaacagttattaccccacacctccagctcccatgcctgggccaactacggggcttgtgacggggcctgatgggaagggcatgaatcctccttcgtattatacccagccagcgcccatccccaataacaatccaattaccgtgcagacggtctacgtgcagcaccccatcacctttttggaccgccctatccaaatgtgttgtccttcctgcaacaagatgatcgtgagtcagctgtcctataacgccggtgctctgacctggctgtcctgcgggagcctgtgcctgctggggtgcatagcgggctgtgcttcatcccttctgcgtggatgncctgcaagacg

SEQ ID NO: 2007 - DNA, 391 bp, homo sapiens
  misc_feature (5)..(354): n=unknown
ggganaatgacaccaatcatttgattacagaaaatggttttataaatcctcctcttgaaattatgttcnnnnnnnnnnnnnnnnnnnnnnnnnnnnnnnnnnnnnnnnnnnnnnnnnnnnnnnnnnnnnnnnnnnnnnnnnnnnnnnnnnnnnnnnnnnnnnnnnnnnnnnnnnnnnnnnnnnnnnnnnnnnnnnnnnnnnnnnnnnnnttctgttcaaaagtatttcagaccaaaaggaggtcataaaaactgttcatataattactctatganngnnaantccctggangnanangggcactgaagatctggcacagagaaacaaggggagacagggcagtgataagatccngccctatttttctagcatgcatttacgaccttgtgga

SEQ ID NO: 2008 - DNA, 553 bp, homo sapiens
gttgcagttagttattccaggtattatttttgttttcagaaaaagaaaactcagtagaagataatggcaagtccagactggggatatgatgacaaaaatggtcctgaacaatggagcaagctgtatcccattgccaatggaaataaccagtcccctgttgatattaaaaccagtgaaaccaaacatgacacctctctgaaacctattagtgtctcctacaacccagccacagccaaagaaattatcaatgtggggcattccttccatgtaaattttgaggacaacgataaccgatcagtgctgaaaggtggtcctttctctgacagctacaggctctttcagttccattttcactggggcagtacaaatgagcatggttcagaacatacagtggatggagtcaaatattctgccgagcttcacgtagctcactggaattctgcaaagtactccagccttgctgaagctgcctcaaaggctgatggtttggcagttattggtgttttgatgaaggttggtgaggccaaacccaaagctgcagaaagtacttgat

SEQ ID NO: 2009 - DNA, 343 bp, homo sapiens
  misc_feature (249)..(340): n=unknown
gaaaaaaatagacatacaaatcacttagttgtaattttaaagaattcctcaaactaaacttgaatttaagcataagcttatgcttacagattactatttgctagcttactaattattatttgaattaagcagtaagaactaaaatttaagtttcttagttttacagattgatttgaaggcatgctgtcttgctaatattgaaataaatttatttcttaaaaattattattttactggattatgtcagangcagggctgtgttcttgaggaaggacaagtttcttctcagaatcatcaaaatgaagcnctcactgtnctgccctccagaggttgggtnggncgg

SEQ ID NO: 2010 - DNA, 363 bp, homo sapiens
  misc_feature (50)..(50): n=unknown
  misc_feature (204)..(277): n=unknown
ctctactcattcactgcagggatggatctcagcaaacgggaatattttgngctttgttaaatctcttagaaagtgtggaaacagaagaggtagtggatatttttcaagtggtaaaagctctacgcaaagctaggccaggcatggtttccacattcgagcaatatcaattcctatatgacgtcattgccagcacctaccctgctnnnnnnnnnnnnnnnnnnnnnnnnnnnnnnnnnnnnnnnnnnnnnnnnnnnnnnnnnnnnnnnnnnnnnnnnnngcaggatgctaattgtgttaatccacttggtgccccagaaaagctccctgaagcaaagggacaggctgaggttctgaacccacgag

SEQ ID NO: 2011 - DNA, 539 bp, homo sapiens
  misc_feature (59)..(59): n=unknown
  misc_feature (238)..(395): n=unknown
  misc_feature (502)..(535): n=unknown
ctaatttgttgtcaaaagtatcaagcaataaattttaaatattgtacagggaataatcngagcatgcaaaattgaaaaccccatgtaaagacagcatgataagctcactggaaattttttaattaaataagcttaaaaagacattggactaaatgctaatatatggaatataagatttcccaatgttaatttagttaacaacttttttgtagtagcatacacacacataccacctttntgtactatctctagaagtaaaatagtaaactatataagatagatatatatgagtagaacaaggnggacatcttgaggtcatttcagaaatgtacatgattttattgagtctgcacacagtttatgatttttaaaaacagatccttcaagctaagttnacacttctaatataaaatgtattttttcttcataaaaacaaaggaaaagcaaaagcttttaggattcccttgaaagaattctctctctttctctgctctcacacaanncacacacccatnacaccacataccatattccncaca

SEQ ID NO: 2012 - DNA, 534 bp, homo sapiens
  misc_feature (418)..(517): n=unknown
atcagttccaggccccattccattctctgaacatcttctgacacactgacagtgctgagcagagcaaggttgggttcgctcctctggcagaacctcggctctcaggaggtccttgttccagggaacagctgcttctctggggctgggctctactccctgcagcccctcgcactacccagctggaaccagggacaacgcctgagtccaaccctcgtgtctattttccagaaaacgggcaatgctgtgagagccattggaagactgtcctctatggcaatgatctcagggctcagtggcaggaaatcctcaacagggtcaccaaccagcccgctcaatgcagaaaaactagaatctgaagatgtgtcccaagctttccttgaggctgttgctgaggaaaagcctcatgtaaaaccctatntctctaagancattcgcgatttagaagtttgtgganggaagtgctggctagatttgactgcaagattgaaggataccccagaaccccgaggttgttctnggttcaaagatgaccag

SEQ ID NO: 2013 - DNA, 483 bp, homo sapiens
  misc_feature (45)..(45): n=unknown
  misc_feature (322)..(322): n=unknown
  misc_feature (460)..(460): n=unknown
actgcttttctctggctttgtttcactcttcttcctcttcccctnctccttcaccttcctccatcgtttccacaatgagctctgctgtgcaggtggcttctccaagactgttgacagccttgcaggtgtacttggcatcgtcatccccgcaaacatcactaataattaaagagcagttcccgtcctcatcgtagtctatctggaagtggcgggactccctgattgactggtcatctttgaaccagacaacctcggggtctgggtatccttcaatcttgcagtcaaatctagcagcacttccctccacaacttctaaatcgcnaatggtcttagagaaatagggttttacatgaggcttttcctcagcaacagcctcaaggaaagcttgggacacatcttcagattctagtttttctgcattgagcgggtggttggtgacctgttgaggatttcctgccantgagcctgagatcattgcataga

SEQ ID NO: 2014 - DNA, 369 bp, homo sapiens
  misc_feature (342)..(342): n=unknown
cttcctgcccggagctgtgcagcaaacagtcgacccccatggggctcagccttcccctgagtactagcgtccctgacagcgcggaatctgggtgcagttcctgcagtaccccactctacgatcagggtggcccggtggaaatcctgccctttctgtacctgggcagtgcgtatcacgcttcccgcaaggacatgctggatgccttgggcataactgccttgatcaacgtctcagccaattgtcccaaccattttgagggtcactaccagtacaagagcatccctgtggaggacaaccacaaggcagacatcagctcctggtttcaacgagggccatttgacnttcatagacttccatcaagaatgctgg

SEQ ID NO: 2015 - DNA, 316 bp, homo sapiens
  misc_feature (203)..(247): n=unknown
cttatgtaacaaaatgtcttcttagaagaagaaatatattatttcaggtcataaataatcagcaaacatacaactgttggcaactaaaaaaaaacccaacactggtattttccatcagtgctgaaaacaaacctgcttaagatatatttacaggatagtacagtactcaaaaacaaaaattgaggtatttggttcttctaggngtagacaatgacatttgtgaaggcagacacctacacaaaaatanataaggtatattctcatatgtatatgtgtcgtcgggaataatactggtaggtatgtcaagcatgaagag

SEQ ID NO: 2016 - DNA, 105 bp, homo sapiens
agatgacccctccctgtgccggctggttcctctcccttttcccctggtcacggctactcatggaagcaggaccagtaagggaccttcgattaaaaaaaaaaaaga

SEQ ID NO: 2017 - DNA, 71 bp, homo sapiens
  misc_feature (49)..(49): n=unknown
tcctgcttccatggagtagccgtgaccaggggaaaagggagaggaaccngccggcacagggaggggtcatc

SEQ ID NO: 2018 - DNA, 405 bp, homo sapiens
  misc_feature (380)..(380): n=unknown
tgtacacgtatcctgaaaactggagggccttcaaggctctcatcgctgctcagtacagcggggctcaggtccgcgtgctctccgcaccaccccacttccattttggccaaaccaaccgcacccctgaatttctccgcaaatttcctgccggcaaggtcccagcatttgagggtgatgatggattctgtgtgtttgagagcaacgccattgcctactatgtgagcaatgaggagctgcggggaagtactccagaggcagcagcccaggtggtgcagtgggtgagctttgctgattccgatatagtgcccccagccagtacctgggtgttccccaccttgggcatcatgcaccacaacaaacaggccactgagaatgcaaangaggaagtgaggcgaattctggggc

SEQ ID NO: 2019 - DNA, 496 bp, homo sapiens
  misc_feature (490)..(490): n=unknown
ggcaggtgcaggcagctaggtgatggcaagagatgttcacttgaagatcttgccctgattgaaggctttgcccacatgctggaaggccccctcccaggaaaagtactctcgaaccagcgtctgggtctcctcgctgccaggatccagtttccgccatgtgtatgactcgtagtccacctgccaatctggactcagcggaaaggcaagctcctggcctcggaagacccagactccagaaatggagctgctattgttggttccaaaaaggatgacactggcgaaggcattcttcctcagcttgtccagtcgctggaacattccagtgatgagattgcagctcatgaaggtctgagtgagttcttcagggaagcgatactctgagtaccacagggaccagccgtccttatcaaagtgctcccagaaatatggcagtgccacagagagtgtgtcctcattggagtacttgcgcttaaattcatccaacacaaangtactc

SEQ ID NO: 2020 - DNA, 236 bp, homo sapiens
gagggaacatgctgagaaactgatgaagctgcagaaccaacgaggtggccgaatcttccttcaggatatcaagaaaccagactgtgatgactgggagagcgggctgaatgcaatggagtgtgcattacatttggaaaaaaatgtgaatcagtcactactggaactgcacaaactggccactgacaaaaatgacccccatttgtgtgacttcattgagacacattacctgaatgagc

SEQ ID NO: 2021 - DNA, 458 bp, homo sapiens
  misc_feature (362)..(440): n=unknown
agtctcacataggaggacctgtgtgagcctcactacccagcgactgccagttagcagaatcaagacctacaccatcacggaaggctccttgagagcagtaatttttattaccaaacgtggcctaaaagtctgtgctgatccacaagccacgtgggtgagagacgtggtcaggagcatggacaggaaatccaacaccagaaataacatgatccagaccaagccaacaggaacccagcaatcgaccaatacagctgtgaccctgactggctagtagtctctggcaccctgtccgtctccagccagccagctcatttcactttacaccctcatggactgagattatactcaccttttatgaaagnactgcatgaataaaattattcctttgtatttttacttttaaatgtcttctgtattcacttatatgttctaattaatanattatttattattaagga

SEQ ID NO: 2022 - DNA, 435 bp, homo sapiens
  misc_feature (147)..(147): n=unknown
aagtgaatacagaagacatttaaaagtaaaaatacaaaggaataattttattcatgcagtgctttcataaaaggtgagtataatctcagtccatgagggtgtaaagtgaaatgagctggctggctggagacggacagggtgccaganactactagccagtcagggtcacagctgtattggtcgattgctgggttcctgttggcttggtctggatcatgttatttctggtgttggatttcctgtccatgctcctgaccacgtctctcacccacgtggcttgtggatcagcacagacttttaggccacgtttggtaataaaaattactgctctcaaggagccttccgtgatggtgtaggtcttgattctgctaactggcagtcgctgggtagtgaggctcacacaggtcctcctatgtgagacttcactccctacac

SEQ ID NO: 2023 - DNA, 385 bp, homo sapiens
  misc_feature (282)..(339): n=unknown
gagaggctctggctcttgcttcttaggcggcccgaggacgccatggccgagtgcccgacactcggggaggcagtcaccgaccacccggaccgcctgtgggcctgggagaagttcgtgtatttggacgagaagcagcacgcctggctgcccttaaccatcgagataaaggataggttacagttacgggtgctcttgcgtcgggaagacgtcgtcctggggaagctatgacccccacccagataaggccaagcttgtgctatcatgtgggaagctctaccctgntggacgataccgattctcagatcccagtttctggcggttagtgtaccacatcaagantgacggcgtggaggacatgcttttcgagctgctgcccagatgactg

SEQ ID NO: 2024 - DNA, 437 bp, homo sapiens
  misc_feature (14)..(124): n=unknown
  misc_feature (335)..(338): n=unknown
cacatacaactttntcacacccaggngcntgaccatctatnacaggggggaaacccaacctctatcccttttccacgtgggcaagccaagggttctgagggctcatccacagggctcgccggcntggcctcctgctgcgtcccgggatgtggaccactgacccagaggcttctgagtcctgagcacagataagggctcctttcaggcctttccttgagctgcacgtgaacctgtgtgggcaggcagcgtttgcaggcgtgtttacgggcaggcagcatttgcaggcgtgtttaccggcaggcagcgtttgcaggcgtgtttacatgcaggcgtanacncatgtgagaccactggtccagggtttcagaggtcctgctcaggtgaatcggctgtgttctcacaagttcacggagctgagtgggttgcaacatgaaata

SEQ ID NO: 2025 - DNA, 509 bp, homo sapiens
  misc_feature (95)..(95): n=unknown
  misc_feature (216)..(216): n=unknown
  misc_feature (502)..(502): n=unknown
gtgccaaaggatcttccccctgacacaactctgctagacctgcaaaacaacaaaataaccgaaatcaaagatggagactttaagaacctgaaganccttcacgcattgattcttgtcaacaataaaattagcaaagttagtcctggagcatttacacctttggtgaagttggaacgactttatctgtccaagaatcagctgaaggaattgccaganaaaatgcccaaaactcttcaggagctgcgtgcccatgagaatgagatcaccaaagtgcgaaaagttactttcaatggactgaaccagatgattgtcatagaactgggcaccaatccgctgaagagctcaggaattgaaaatggggctttccagggaatgaagaagctctcctacatccgcattgctgataccaatatcaccagcattcctcaaggtcttcctccttcccttacggcttacatcttgatggcaacaaaatcagcagagttgatgcagctagctgaanaggactg

SEQ ID NO: 2026 - DNA, 615 bp, homo sapiens
  misc_feature (420)..(597): n=unknown
aatgacattagtaaaaattttacatagcctgtattgaattcacacattcaaatgaggctttaccagtaatgatggggattaatacagagctagtgtttggcatttgactttatctcaaatgagctaactgctcaatgaattacagaagactcatactctttttattttttcctggaaattaaaaaagaaaagctttactaaatattgacatatatatttactccaaattttacatttagtgaaataagaatatctctagtagctcagttaacatcaacagaaagcttcaaaagatgattctgaaaatggcaggcaaaatttctttttattgtaggcaattacttaaactggaaatttggctttatgcataataagtcatgtgggtaaaacatccacattgcagttaggtttccagtttcnagctnctatttattttttagcaatgacattaacaagattttgccaggtatcaaaatgagggcttcttgagaattacttatagtttccgagttgnatggncgagcgcacgtagacacatctgaaggtggatggctgtatctcccagtactggaccggggtgctgaaaagactcacatncgaataagaagccctttt

SEQ ID NO: 2027 - DNA, 346 bp, homo sapiens
  misc_feature (99)..(171): n=unknown
  misc_feature (296)..(330): n=unknown
aagatgcccaatactttcatggctgtagctatggatctctgtgatagagactcgccttttggcagcatccaccctcgagataaacagactgtggcttancggctgcatttgggggcccgtgctctggcttatggtgagaagaatttgacctttgaaggaccactgcctganaagatagaactcttggctcacaaggggctgctcaatctcacatattaccagcaaatccaggtgcagaaaaaggacaacaagatatttgagatctcctgttgcagtgaccatcgatgcaagtggcntccagcttctatgaacaccgtctccaaccgagtncctgaccctggcggat

SEQ ID NO: 2028 - DNA, 62 bp, homo sapiens
caatgttagctgtttttaatccatcagtaaactgcattaagattcttaataaacaaaacact

SEQ ID NO: 2029 - DNA, 497 bp, homo sapiens
  misc_feature (56)..(56): n=unknown
gcaacaataacacttgggtgttcggcggagggaccaagctgaccgtcctgcgtcanccaaggctgccccctcggtcactctgttcccgccctcctctgaggagcttcaagccaacaaggccacactggtgtgtctcataagtgacttctacccgggagccgtgacagtggcctggaaggcagatagcagccccgtcaaggcgggagtggagaccaccacaccctccaaacaaagcaacaacaagtacgcggccagcagctacctgagcctgacgcctgagcagtggaagtcccacagaagttacagctgccaggtcacgcatgaagggagcaccgtggagaagacagtggcccctacagaatgttcataggttctcaaccctcacccccccccacgggagactagagctgcaggatcccaggggaggggtctctcctcccaccccaaggcatcaagcccttctccctgcactcaataaatattctcattgtcaatca

SEQ ID NO: 2030 - DNA, 499 bp, homo sapiens
  misc_feature (430)..(430): n=unknown
agggcttgatgccttggggtgggaggagagacccctcccctgggatcctgcagctctagtctcccgtgggggggggtgagggttgagaacctatgaacattctgtaggggccactgtcttctccacggtgctcccttcatgcgtgacctggcagctgtaacttctgtgggacttccactgctcaggcgtcaggctcaggtagctgctggccgcgtacttgttgttgctttgtttggagggtgtggtggtctccactcccgccttgacggggctgctatctgccttccaggccactgtcacggctcccgggtagaagtcacttatgagacacaccagtgtggccttgttggcttgaagctcctcagaggagggcgggaacagagtgaccgagggggcagccttgggctgacgcaggacggtcagcttggtncctccgccgaacacccaagtgttattgttgctcgaccgaattccgagcttaacgtaacgcgtgcatgcg

SEQ ID NO: 2031 - DNA, 480 bp, homo sapiens
agagactcccgtgagcacgaggagcccaccacctctgagatggccgaggagacctactcccccaagatcttccggcccaaacacacccgcatctccgagctgaaggctgaagcagtgaagaaggaccgcagaaagaagctgacccagtccaagtttgtcgggggagccgagaacactgcccacccccggatcatctctgcacctgagatgagacaggagtctgagcagggcccctgccgcagacacatggaggcttccctgcaggagctcaaagccagcccacgcatggtgccccgtgctgtgtacctgcccaattgtgaccgcaaaggattctacaagagaaagcagtgcaaaccttcccgtggccgcaagcgtggcatctgctggtgcgtggacaagtacgggatgaagtgccaggcatggagtacgttgacggggactttcagtgccacaccttcgacagcagcaacgttgagtgat

SEQ ID NO: 2032 - DNA, 434 bp, homo sapiens
  misc_feature (11)..(126): n=unknown
  misc_feature (400)..(400): n=unknown
tggcgtcctgnngtggagggaggcgctggctggagtcggggctggnngtggganggggtgagggaaaggttggggggggacgcatcactcaacgttgctgctgtcgaaggtgtggcactgaaagtncccgtcaacgtactccatgcctggcagcttcatcccgtacttgtccacgcaccagcagatgccacgcttgcggccacgggaaggtttgcactgctttctcttgtagaatcctttgcggtcacaattgggcaggtacacagcacggggcaccatgcgtgggctggctttgagctcctgcagggaagcctccatgtgtctgcggcaggggccctgctcagactcctgtctcatctcaggtgcagagatgatccgggggtgggcagtgttctcgggntcccccgacaaacttggactgggtcagcttcttt

SEQ ID NO: 2033 - DNA, 419 bp, homo sapiens
  misc_feature (381)..(395): n=unknown
gccctgcagtcaacagccagtctcttcgtggtctcactctctcttctgcatctctactcttaagagactcaggccaagaaacgtcttctaaatttccccatcttctaaacccaatccaaatggcgtctggaagtccaatgtggcaaggaaaaacaggtcttcatcgaatctactaattccacaccttttattgacacagaaaatgttgagaatcccaaatttgattgatttgaagaacatgtgagaggtttgactagatgatggatgccaatattaaatctgctggagtttcatgtacaagatgaaggagaggcaacatccaaaatagttaagacatgatttccttgaatgtggctgaggaatatggacacttaatactancttgaaaataagantagaaataaaggatggggattgtg

SEQ ID NO: 2034 - DNA, 383 bp, homo sapiens
  misc_feature (54)..(54): n=unknown
  misc_feature (235)..(235): n=unknown
aggtagtattaagtgtccatatttctcaagccacattcaaggaaatcatgtctnaactattttggatgttgcctctccttcatcttgtacatgaaactccagcagatttaatattggcatccatcatctagtcaaacctctcacatgttcttcaaatcaatcaaatttgggattctcaacattttctgtgtcaataaaaggtgtggaattagtagattcgatgaagacctgtttntccttgccacattggacttccagacgccatttggattgggtttagaagatggggaaatttagaagacgtttcttggcctgagtctcttaagagtagagatgcagaagagagagtgagaccacgaagagactggctgttgactgcaggg

SEQ ID NO: 2035 - DNA, 130 bp, homo sapiens
ggagtgatttgtcctcatttgtcaaatgaggaatgagacacttaccatcatctcaggttgtttcttaaagacctaaatacaaatacaatttgttaaaaacttacagagggcctattttgaatgctttaag

SEQ ID NO: 2036 - DNA, 285 bp, homo sapiens
ccgcacctggccctgaaatcttaaagggagataggtatgtaagtcctctaaagagtgtcttgagactgggctttggggtctatcttgaagaaggggagtcccaggagacaaatgtgtgcagggctctcctggggcctgggggtggagaggaactaggagggatggggaatgtcagtgctgtgcagcctgggcctcaggtgtcccctaccctcctgcaccatcctgcacatggagcaaatctgttggctcctgagaccatctaaactatgggacaggcgctgggga

SEQ ID NO: 2037 - DNA, 355 bp, homo sapiens
  misc_feature (250)..(250): n=unknown
ccctgcagcaggggaggggagggcgtggggaggtgggcgcccctcccaccagcctgagaccgctctctgcctctctcctctcctctcttctccagcatctcacccactttctctccttctcaatctcctgctcccacctccagcacttcggggattcctcttgtagcccctgctttctaagtccaccctgggctggggaaaggaaagtaagagaccacggggacaatttcaagccccccagtctccacangggctagtccccctggctactgcctggctttctctctcctgggctaagggctggggaagtctgcggggctcagtcctggccctgcagtatcccaacaacctgctc

SEQ ID NO: 2038 - DNA, 341 bp, homo sapiens
  misc_feature (103)..(283): n=unknown
gcctgctgaggcagtggttgtggggatcggtctccaggcagcagggggcagcagggtcaaggagaggctaactggccacgggtggggccagcaggcgggcagnaggaggctttaaagcgcctaccctgcctgcaggtgagcagtggtgtgtgagagccaggcgtccctctgcctgcccactcagtggcaacacccgggagctgttttgtcctttgtggagcctcagcagttcctctttcagaactcactgccaagagcctgaacaggagccaccatgcagtgcttcagtttcattaagaccatgatgatcctcttcaattgctcatctttctgtgtggtgc

SEQ ID NO: 2039 - DNA, 287 bp, homo sapiens
  misc_feature (130)..(283): n=unknown
tccacccagaggctctgctgatttcacttatgcccaggctataaaatgcctttctctcatcccccagtagagcactgggatcaccactaggcctagggggcatatcaagggtttaatagactgggggaangggcaacagaactggctaccttagaggctctggaatgcnccccacanatccacccaaccaatggnaggaaantcaggcatcgcctaaaaggagtggtccctatctanccccnagtcnngagcagaaagggcaggnccattcnggcccaagtgncatt

SEQ ID NO: 2040 - DNA, 439 bp, homo sapiens
  misc_feature (223)..(223): n=unknown
gatccttaagacattgccccaggcaatgcccataatatcctaaaggttccttgaagttaagtttcaaggatcaagtttcagttttctattttagaatagaaacattactcttgggttcaatccagtagctcatctgccccccagtctccttaggcactgattccttcatgctgtgctttgagaaaggaagcctaggctgacgagaccatcttgcctccctgtngatcgtcacagctacctgtctctggggatccctagtataacacattcagtgttcccctttcagtcttactactttgaccgcgatgatgtggctttgaagaactttgccaaatatttcttcaccaatctcatgaggagagggaacatgctgagaaatgatgaagtgcagaaccaacgaggtggccgaatcttccttcaggatatcaaggtgaacaaa

SEQ ID NO: 2041 - DNA, 588 bp, homo sapiens
  misc_feature (581)..(581): n=unknown
caaagaacttaagtggatgttttggtacaacttatagaaaaggtaaaggaaaccccaacatgcatgcactgccttggtgaccagggaagtcaccccacggctatggggaaattagcccgaggcttagctttcattatcactgtctcccagggtgtgcttgtcaaagagatattccgccaagccagattcgggcgctcccatcttgcgcaagttggtcacgtggtcacccaattctttgatggctttcacctgctcattcaggtaatgtgtctcaatgaagtcacacaactgcaaaacaatggggaagacagttagtgggcagctttcccaatccctaaggcaaatgatttcctccatttatttcctggggttccaatactcacatgggggtcatttttgtcagtggccagtttgtgcagttccagtagtgactgattcacattttttcccaaatgtaatgcacactccattgcattcagcccgctctcccagtcatcacagtctggtttctgaatgagaataggttaatgcatctctaccaactaaacctagaagtcagcaagcccatcatctctaaccancacgttt

SEQ ID NO: 2042 - DNA, 372 bp, homo sapiens
ggaaatagccctgtccaggagttcactgtgcctgggagcaagtctacagctaccatcagcggccttaaacctggagttgattataccatcactgtgtatgctgtcatggccgtggagacagccccgcaagcagcaagccaatttccattaattaccgaacagaaattgacaaaccatcccagatgcaagtgaccgatgttcaggacaacagcattagtgtcaagtggctgccttcaagttcccctgttactggttacagagtaaccacccactcccaaaaatggaccaggaccaacaaaaactaaaactgcaggtccagatcaaacagaaatggctattgaaggttgcagccacagtggagtatgtggttag

SEQ ID NO: 2043 - DNA, 603 bp, homo sapiens
  misc_feature (260)..(260): n=unknown
agtagtaaagctttggcacatacagtataaaaaataatcacccaccataattataccaaattcctcttatcaactgcatactaagtgttttcaatacaattttttccgtataaaaatactgggaaaaattgataaataacaggtaagagaaagatatttctaggcaattactaggatcatttggaaaaagtgagtactgtggatatttaaaatatcacagtaacaagatcatgcttgttcctacagtattgcgggccagncacttaagtgaaagcagaagtgtttgggtgactttcctacttaaaattttggtcatatcatttcaaaacatttgcatcttggttggctgcatatgctttcctattgatcccaaaccaaatcttagaatcacttcatttaaaatactgagcggtattgaatacttcgaagcagaacaggcaatgtgcagccctcatttatgagaaaacccctcaggaaactcccagggtgatgcttggagaagctgtgagttgagctgaagctggagaacttcctccagagcaaagggttaagaaagaaagaagactctaagctgggtctgctaacatcactccagtttagatg

SEQ ID NO: 2044 - DNA, 522 bp, homo sapiens
ctcctttctcttctctgttccattgaatctgtatggctagaatatcctacttctccagcctagaggtactttccacttgattttgcaaatgcccttacacttactgttgtcctatgggagtcaagtgtggagtaggttggaagctagctcccctcctctcccctaccactgtcttcttcagggtcctgagatttacacggttggagtgttatgcggtctagggaatgagacaggacctaggatatcttctccaggatgtcaactgacctaaaatttgccctcccatcccgtttagagttatttaggctttgtaacgattgggggataaaaagatgttcagtcatttttgtttctacctcccagatcggatctgttgcaaactcagcctcaataagccttgtcgttgactttagggactcaatttctccccagggtggatgggggaaatggtgccttcaagacttcaccaaacatactagaagggcattggccattctattgtggcaagctgagtagaagatc

SEQ ID NO: 2045 - DNA, 568 bp, homo sapiens
  misc_feature (499)..(499): n=unknown
ggattgagcataaacccctccaaaaacaatttttaaaaaacccaaaaagtacacaaaaaacccctgaatacaaaatctaaccttttcccccagcctccctaagggtaagttactgactttaaggcagctattaatagattgccccacaattccaggtttcaatttagccaatataggacatatcaccaagtgagctaattcacagcaatgcacacaagactcctcaaggtcaggcacagagtggggggtggtggccagggggaattgagggaggctctaagctaggggcactgcatggtgggacaggatggccccttgaggactgaaccctggggagaagacaaacagtaataataaaaacaaataacaagtactttaagaatggattgtatgacctatagtgacagatgacatcactaatactgaaagcttcttatattaataattttggcaaaatgtcattttgtaatatagtatatgctttccaggtgtgggggtngtaaagtaatgagggccaaaatcatcctgccccaagactaatatcttctaatggtgcattagcaaggaa

SEQ ID NO: 2046 - DNA, 272 bp, homo sapiens
  misc_feature (196)..(268): n=unknown
ggccccatgtttgtcaaagcaaccttcgccgaggacagcaagagcatagccaccgagatcatcctggagattaagaaggcatttgaggaaagcctgagcaccctgaagtggatggatgaggaaacccgaaaatcagccaaggaaaaggccgatgccatctacaacatgataggataccccaacttcatcatggatnccaaggagctggacaaagtgtttaatgactacactgcagttccagacctctactttgaaaatgccatgcggntttt

SEQ ID NO: 2047 - DNA, 469 bp, homo sapiens
  misc_feature (344)..(449): n=unknown
ggatcatcctggcccatcggaggatgcgcacagtcaccaactacttcatcgtcaatctggcgctggctgacctctgcatggctgccttcaatgccgccttcaactttgtctatgccagccacaacatctggtactttggccgtgccttctgctacttccagaacctcttccccatcacagccatgtttgtcagcatctactccatgaccgccattgctgccgacaggtacatggccatcgtccaccccttccagcctcggctttcagctcccagcaccaaggcggttattgctggcatctggctggtggctctcgccctggcctcccctcagtgttctatccancgtcaccatggaccagggtgccaccaagtgcgtggtggctggcccgaagacagcgggggcnagacgctcctcctgtaacaactcgtggtgatngccctcatctanttcctgccgctcgcggtgat

SEQ ID NO: 2048 - DNA, 364 bp, homo sapiens
gccaaagagcacgctgaattagaagaactgaaacaggttcttctgcagaatgaaaggtctttcaatcctcttgaagatgatgatgactgccaaattaaaaaacgttcagcttctctaaactccaagccatcttctctacgaagagtgactattgcctctttacccagaaatattggaaatgcaggaatggtggctgggatggaaaataatgatcgattcagtagaaggtcaagcagttggcgtattttggggtcaaagcagagtgaacaccgtccctcattacctcgatttattagcacctattcctgggcagatgctgaagaagaaaaatgtgaactaaaaactaaagtgactcagagccatc

SEQ ID NO: 2049 - DNA, 608 bp, homo sapiens
  misc_feature (537)..(537): n=unknown
aacaatatataatatttcttccttaaaaagctcattcaaagatcataggcagacttcttccccattgtattttagttggggagataaaggcaaaaagaggaaatgtaagctatcttacagtcattctgagaacctctggtttcatgctatactttcccagctaaaagttactaatttacgaagtcagatactgaaacttaaaaatcaagatccatatattaggatgtcctgctgtcacactggtggtggcccattgtgtcggagtctggtaaatggccacaagatatgttctagagacgtccatgagtcctcttgctgtgtgggagcggcatccacagacttctggaataattggcctgtgaggaagctcatcaaagctgcaaacagtacaatgaatgcaatagagagccagagggccttattagcctttctgatggaggacttgagatttgttgcccaggaagctattgtgtcataaactgaagagacatcccactttgatggattatttttcttttcagaaagacttggcttccntgtcctttctactgtttcttctccagatggctctgagtcatcttagttttagttcacattttctcttcagc

SEQ ID NO: 2050 - DNA, 536 bp, homo sapiens
  misc_feature (500)..(500): n=unknown
caaagctgtcaaaacagtgctcatggaactcttccaggattcaggcaatactgatattgagggcatagataccaccaatgcctgctacggtggtactgcctccctcttcaatgctgccaactggatggagtccagttcctgggatggtcgttatgccatggtggtctgtggagacattgccgtctatcccagtggtaatgctcgtcccacaggtggggccggagctgtggctatgctgattgggcccaaggcccctctggccctggagcgagggctgaggggaacccatatggagaatgtgtatgacttctacaaaccaaatttggcctcggagtacccaatagtggatgggaagctttccatccagtgctacttgcgggccttggatcgatgttacacatcataccgtaaaaaaatccagaatcagtggaagcaagctggcagcgtcgaccttcacccttgacgatttacagtacatgatctttcatacaccttttgcnagatggtccagaagtctctggctcgctgatgtcatg

SEQ ID NO: 2051 - DNA, 452 bp, homo sapiens
  misc_feature (437)..(437): n=unknown
agttctaacacatgacaggaaagtttatctggatcttgaaggcaacagctgatctgcatgcacatttctggagtccagtgattcaggaagaggtcttctctccattgctccatcttgctctttcacaaaggacccctagtccatagcaccataagcccaggacagtgattgcagcatggagaggaatgaagggcccgctagagatggctcctcactctacagggctgatgcttatggggctactatgtcgattcaaattcatttaccagctaagagtgggatcttaaaaatatgattcacggggagaagctctgctagcatacgtttcccaggaagctttccatggatctgcagaacacctttagacgggacgccgggcatactttcggcgatgctgctcgtccactcgctccaggtaccaagtacctggggaaaangctgtttgtgtcacc

SEQ ID NO: 2052 - DNA, 341 bp, homo sapiens
ccggcacactgcaaagacgaaccttcctactgggctccggtgtttggaaccaacatctatgcagatacctcaagcatctgcaagacagccgtgcacgcgggagtcatcagcaacgagagtgggggtgacgtggacgtgatgcccgtggataaaaagaagacctacgtgggctcgctcaggaatggagttcagtctgaaagcctggggactcctcgggatggaaaggccttccggatctttgctgtcaggcagtgaatttccagcaccaggggagaaagggcgtcttcaggaaggcttcggggtttgcttttattttatttgtcattgcggggtatatggag

SEQ ID NO: 2053 - DNA, 168 bp, homo sapiens
  misc_feature (40)..(155): n=unknown
cacaaattggtcagatttgttcataaaagatatgttacangaanattttaganatcnnnccagttcnantgnnacaattgnaacaacgnggcccctgtncatgcaanncacagaaaacatttacnataaaactttgtacacaggaagtagctnnnacatcatttgtca

SEQ ID NO: 2054 - DNA, 150 bp, homo sapiens
ggatctcctaacggatattccatccctcagctcatttttcccagggacatgtcagggtgatgatggccatggtaacatggccatgggcccgcacgggctggactaccttcacggtccctcactgcaatggcatacgttcatccctgtttt

SEQ ID NO: 2055 - DNA, 527 bp, homo sapiens
  misc_feature (487)..(513): n=unknown
gatgtccacgctgcccgcgactcctgagcacactcccatggcgggtggcgtgctctgggtgggtgtgcggcagtggccggtcagggtgtagggaaggggactgagaggggaccttggtgagcttgcatttgtgtggggatacacgtgaaggggtgtctgatcccaggactcagggcctcttcctcctggggggcacacagagccccttcccttcctcctcggggaacagccccggaatggggccttcccttggtgcctctaggtcctgccctccagcccatgtccccagaaggtggtctttccttggaggggtcagagactatagcccagggctctggggtcactgtgggaacatctgcctcagctcggcacgcacttctcctggcctgtttcttccactgggaactgggaccctaacccctcaaagggggatccctgagcgagggtcatgggcagggagctggtatggacgggtgtgtgcggggangggtgactggcgggggctggggtgtnagggggtggggtgc

SEQ ID NO: 2056 - DNA, 374 bp, homo sapiens
  misc_feature (47)..(47): n=unknown
  misc_feature (345)..(373): n=unknown
cttccttaggaatcagtggcatatgcgtttatgttctttaacagggnaagtaaaagtgagcgcacttttttgaagctcataaatactcatgtgactgtaaatttagaaatgttaattaattgggcctaatgtttgatctggaaaagtacttagcagtcaccaggaatttgccttgaactgactcgaaccacaaatcagaaccgtatttccacaatttaatttttccatgagacaatcataaaaactctgctgggattatattactaaaacctttatatcccattgcattggatatgtttgtaggtgagtaatgttaaatttaaaaaaaaaaattaataaagcatntgtttaggacctctgtatgcttgataang

SEQ ID NO: 2057 - DNA, 350 bp, homo sapiens
  misc_feature (274)..(296): n=unknown
ctctgggaagtggactgtggtttttccagaggaactcagttaagaaatcgagagtggattagactcccagttccaccaaacctatgagccttccactgtggatgggggccgtgatcctgatggtcacattgctttaacccagcagggcttcggccaggggctttccacttgaggatagcagcttcactaggctggccggccagctccacatctgactgggttcttacttctcagccagtacctacccctattgcggtcctccagctcatctttnnnnnnnnnnnnnnnnnnnnnnntggctttaattatgctaatgttggaggagaatgaataaataaagtgaatctttg

SEQ ID NO: 2058 - DNA, 173 bp, homo sapiens
  misc_feature (133)..(171): n=unknown
aaagatgagctggaggaccgcaataggggtaggtactggctgagaagtaagaacccagtcagatgtggagctggccggccagcctagtgaagctgctatcctcaagtggaaagcccctggccgaagccctgcngggttaaagcaaagngaccaacaggaacacggcccccnac

SEQ ID NO: 2059 - DNA, 505 bp, homo sapiens
  misc_feature (397)..(397): n=unknown
ggaaatccggcacctcaaggatgagatggcccgccatctgcgcgagtaccaggacctgctcaacgtgaagatggccctggatgtggagattgccacctaccggaagctgctggagggagaggagagccggatcaatctccccatccagacctactctgccctcaacttccgagaaaccagccctgagcaaaggggttctgaggtccataccaagaagacggtgatgatcaagaccatcgagacacgggatggggaggtcgtcagtgaggccacacagcagcagcatgaagtgctctaaagacagagaccctctgccaccagagaccgtcctcacccctgtcctcactgctccctgaagccagccttcttccatcccaggacaccacacccagcctcnttcctcccctcacagcctctgacccctcctcactggccatccctcgtggtccccaacagcgacatagcccatccctgcctggtcacagggcatgccccggcaacttct

SEQ ID NO: 2060 - DNA, 437 bp, homo sapiens
cctgcagcaggggaggggagggcgtggggaggtgggcgcccctcccaccagcctgagaccgctctctgcctctctcctctcctctcttctccagcatctcacccactttctctccttctcaatctcctgctcccacctccagcaccttcggggattccctcttgtagcccctgctttctaagtccaccctgggctggggaaaggaaagtaagagaccacggggacaatttcaagccccccagtctccacaggggctagtccccctggctacctgcctggctttctctctcctgggctaggggctggggaggtctgcggggctcagtcctggccctgcagtatcccaacaccctgctctggggctgtctccagagccaaaggctagtgcctgaggtcacagaggtgggagggacagggccaccgctcccgcctgggct

SEQ ID NO: 2061 - DNA, 465 bp, homo sapiens
  misc_feature (440)..(450): n=unknown
ggccgtaccactggcatcgtgatggactccggtgacggggtcacccacactgtgcccatctacgaggggtatgccctcccccatgccatcctgcgtctggacctggctggccgggacctgactgactacctcatgaagatcctcaccgagcgcggctacagcttcaccaccacggccgagcgggaaatcgtgcgtgacattaaggagaagctgtgctacgtcgccctggacttcgagcaagagatggccacggctgcttccagctcctccctggagaagagctacgagctgcctgacggccaggtcatcaccattggcaatgagcggttccgctgccctgaggcctcttccagccttccttcctgggcatggagtcctgtggcatccacgaaactaccttcaaactccatcatgaagtgtgacgtgggacatccgcaaanaactgtacancaacacagtgctgtc

SEQ ID NO: 2062 - DNA, 304 bp, homo sapiens
agcagtcggttggagcgagcatcccccaaagttcacaatgtggccgaggactttgattgcacattgttgtttttttaatagtcattccaaatatgagatgcgttgttacaggaagtcccttgccatcctaaaagccaccccacttctctctaaggagaatggcccagtcctctcccaagtccacacaggggaggtgatagcattgctttcgtgtaaattatgtaatgcaaaatttttttaatcttcgccttaatacttttttattttgttttattttgaatgatgagccttcgtgccccccctt

SEQ ID NO: 2063 - DNA, 514 bp, homo sapiens
  misc_feature (178)..(178): n=unknown
  misc_feature (332)..(332): n=unknown
cttccctaggctatttctgccgggcgctccgcgaagatgcagctcaagccgatggagatcaaccccgagatgctgaacaaagtgctgtcccggctgggggtcgccggccagtggcgcttcgtggacgtgctggggctggaagaggagtctctgggctcggtgccagcgcctgcctgcncgctgctgctgctgtttcccctcacggcccagcatgagaacttcaggaaaaagcagattgaagagctgaagggacaagaagttagtcctaaagtgtacttcatgaagcagaccattgggaattcctgtggcacaatcggacttattcacgcagngccaataatcaagacaaactgggatttgaggatggatcagttctgaaacagtttctttctgaaacagagaaaatgtcccctgaagacagagcaaaatgctttgaaaagaatgaggccatacaggcagccccattgatgccgtggcacaggaagggccaatgtcgggtagatgacaaggtgaa

SEQ ID NO: 2064 - DNA, 614 bp, homo sapiens
aacaattaaaccacatccaaggtcttaacttacagacagaaaccaaagtagccatttaaagcgttagatatcggatacaagacatacactggggagaatgcttcaccatctgaagctcacaccacaatggcccagtggacagctgtgcactctgcttgtgcttaagtgcctgggtgtggctgaggggaaggcgtgtctgcagaacagaagaacagctgtgtttcacaagtactgaagcattttagactgcatgggggggtatatattttcatgttgaagggaagaggggaaatcagcaaagtccctcccacagagcattaggctgccttgcagagagccacggcagagaagcggacttctccttgctcacgctcggtgaattctctgcagaccttggcagcgtccttcagcagggtgtcctctgaactggcgccatggttcaccggaaaaggcattcgtccatcaagttcatagaggtggccatccacgttgttaaacagaataaaatggaaattcaccttgtcatctacccgacattgggccttcctgtggccacggcatcatgggctgcctgtatggcctcattcttttcaaagcatttttgctctgtcttc

SEQ ID NO: 2065 - DNA, 362 bp, homo sapiens
  misc_feature (174)..(351): n=unknown
cctcctccctgactgggaactcgcttggccgcaatgacctggctgatggtgtgaactcgggccagggcctgggcatcgagatcatcgggaccctccagctggtgctatgcgtgctggctactaccgaccggaggcgccgtgaccttggtggctcagccccccttgccatcggcntctctgtagcccttggacacctcctggctattgactacactggctgtnggattaaccctgctcggtcctttggctccgcggtgatcanacacaacttcagcaaccactggattttctgggtgggggcattcatcggggggagccctggctgtactcatctacgacttcatcctgggnccacgcagcag

SEQ ID NO: 2066 - DNA, 487 bp, homo sapiens
tgaaattccaactccaaagagacatatatgcagagcagacagatgcagggccttggtgtgcagcagcctagaaccaggcagggggtgggtgtgacccctctcccctccatcacaactctccccactcctggcccctggccattgcccaggcagaaactgagaagctggaaatgagaggaatcagcctcgtggtccagggagtagccagagacagggccttggttactaggcctggccaaatcattgtctagctgaaaccgtgggcctcagtttctttatctgttaaatgagctagaagttcctgctagggaatggagaagagagtgtgcagatgtgatgcactggtgatagttaagggcttctggttgtccctctgcttctaaatacctgcgtaattgtgtctcttgggttctgttgccatcatggctaagtgcacagtggtggagtgctctggcctggtggaattgaaaggacttatgtagataga

SEQ ID NO: 2067 - DNA, 539 bp, homo sapiens
  misc_feature (283)..(311): n=unknown
  misc_feature (479)..(516): n=unknown
caacaacttcagcaagatggcggaggaaaagctgatcctgaaaatggaacaaattaaggaaaaccgtgaggctaatctagctgctattattgaacgtctgcaggaaaaggagaggcatgctgcggaggtgcgcaggaacaaggaactccaggttgaactgtctggctgaagcaagggagggtctggcacgccccaccaatagtaaatccccctgcctatattataatggatcatgcgatatcaggatggggaatgtatgacatggtttaaaaagaactcattnnnnnnnnnnnnnnnnnnnnnnnnnnnnnaattaaaaaaaatcaatgcggtctctttgcagaatgttttgcttgatgtttaaaaaataccttggatcttattttgtaaatacttacatttttgttaaaaaatacaagtattgcattatgcaagttatttcataatcttacatgtcctgtaacaggcttttgatgttngtgtcttccactcaaatggaatttgctaggnctgtnnttttgaagctccccatgtctaac

SEQ ID NO: 2068 - DNA, 242 bp, homo sapiens
  misc_feature (16)..(201): n=unknown
ctgatatcgcatgatnnattataatatangcagggngntttactattngtgnngngtnccatgaccctcccttgcttcagccatacagttnaacctggngntccttggtcctgcncacctccgcagcatgcctctccttttcctnnagacgttcaataatagcagtagattagcctcacggtntgccttaagtgngccatnttcaggatcagcttttcctccgccatcttgctgaagttgtt

SEQ ID NO: 2069 - DNA, 390 bp, homo sapiens
gcccaagctccaggcagggtgggctggatcactagcgtcctggatctctctcagactgggcagccccgggtcattgaaatgccccggatgacttggctagtgcagaggaattgatggaaaccaccggggtgagagggaggtccccatctcagccagccacatccacaaggtgtgtgtaagggtgcaggcgccggccggttaggccaaggctctactgtctgttgcccctccaggagaacttccaaggagctttccccagacatggccaacaagggtccttcctatggcatgagccgcgaagtgcagtccaaaatcgagaagaagtatgacgaggagctggaggagcggctggtggagtggatcatagtgcagtgtggccctgatgtgggc

SEQ ID NO: 2070 - DNA, 352 bp, homo sapiens
  misc_feature (343)..(343): n=unknown
tattccaggacaagatagggggcaggctgggctggttcttcttcaatgggcttttgccgccaaggaggacagtggacttggcccacatccaggctacccccagcccgcttctcccctgcttagcccagggaggagacagtagaggtgatgggggcagccgggagggaggggccaaggcagtgatgctttcgggtaagaagttgggctgaggctgggggcacagggaggagctgcccaggtgcagttaccattgctcagtgacagagcctcaaagcttggccaagggctgaaggtaccacacgggtgtgggtgaggcaggctaagcgggatggctgcagccaangagctgggg

SEQ ID NO: 2071 - DNA, 499 bp, homo sapiens
  misc_feature (52)..(53): n=unknown
  misc_feature (464)..(464): n=unknown
ctgtgaaggtgaccggcgagggccgcatgaaggagagcatcacccggcgganncaggcaccttccatcgccaccatcggcagcacctgtgacctcaacctcaagatcccaggaaactggttccagatggtgtctgcccaggagcgcctgacacgcaccttcacacgcagcagccacacctacacccgcacggagcgcacggagatcagcaagacgcggggcggggagacaaagcgcgaggtgcgggtggaggagtccacccaggtcggcggggaccccttccctgctgtgtttggggacttcctgggccgggagcgcctgggatccttcggcagcatcacccggcagcaggagggtgaggccagctctcaggacatgactgcacaggtgaccagcccatcgggaaaggtggaagccgcagagatcgtcgagggcgaggacagcgcctacagcgtgcgctttgtnccccaggaaaatggggccccatacggtcgctgtca

SEQ ID NO: 2072 - DNA, 465 bp, homo sapiens
  misc_feature (3)..(179): n=unknown
  misc_feature (305)..(444): n=unknown
gancccagcngagntncatcncatntgaaaannccccctagnaagctnngcatcccagtgtgtnnnaaaggcccnccatggggcagagccgtgcaaccattttaaaaaancncacagtgagagagactcaggccccctgggagcctggcttgggtggagtgcacatcgctcaggccggnccatgtgccaggccactcctgctggttcgggggctgttttcttctctgattgtgctttcctttccaagtccttaaaactctggggttgtagccaccagagagaccagaccaagtcctcggggtcangagggtatctggccggcggtgcagtttgagggtgacctcacacacagacacccanaacacaatgctcccccactgctcagccccgcnagaaactcagggcttccctggcctcgcagccctcgccagccccttgtgtccnagcttctgcccctgagcctgg

SEQ ID NO: 2073 - DNA, 482 bp, homo sapiens
  misc_feature (137)..(137): n=unknown
  misc_feature (394)..(394): n=unknown
tgtgcccagaacgcggttaggaagtgtgtgcatacgtctgaaccctaaatggttctcagttctgtaaacttctcctcccactgggtggagtagggcctttaagagcagctggaatgcagttcccctgatcagcgtancagttgttgcctgtctgaacctctgccagtcctggagactggtgccctgagctccaaccagcgggcctcatcctacaccctcaccaccgcaacttctcacccgagcaagaagcagctcccagagagaaagaacgttcccacctgcctagccatgggagaggacgctgcacaggccgaaaagttccagcaccctgggtctgacatgcggcaggaaaagccctcgagccccagcccgatgccttcctccacaccaagcnccagcctgaacctagggaacacagaggaggccatccgggacaactcacaggtgaacgcagtcacggtgctcacgctcctggacaagtg

SEQ ID NO: 2074 - DNA, 185 bp, homo sapiens
  misc_feature (14)..(173): n=unknown
cgcaacaaaccaanatttnangngacagtatngcaaaaataaggacatagctgaatagggtaagccaacaaaatgtttgttaancctatcccttttattaaagacaaagcacagtttgttaanattgtcttggattaactctatttgtaaggntacttatagtggntcatacnaaaggcagggga

SEQ ID NO: 2075 - DNA, 475 bp, homo sapiens
  misc_feature (25)..(88): n=unknown
gagaaactagatcagcagatcccannnngncgnttcacccacgtgaacaccaccaccagcgccacacatagcacagccaccatcctcnaccctcgagatacgtactgcaggggagaccagctgcacatcctgctggaggtgagggaccacttgggacgcaggaagcaatatggcggggatttcctgagggccaggatgtcttccccagcgctgatggcaggtgcttcaggaaaggtgactgacttcaacaacggcacctacctggtcagcttcactctgttctgggagggccaggtctctctgtctctgctgctcatccaccccagtgaaggggtgtcagctctctggagtgcaaggaaccaaggctatgacagggtgatcttcactggccagtttgtcaatggcacttccccaagtccactctgaatgtgggcctgatcttaaaacaccaaatgctgaattgtgccagtacctg

SEQ ID NO: 2076 - DNA, 293 bp, homo sapiens
  misc_feature (54)..(283): n=unknown
acatgttgaggtgggtgtacattatttgtgccatatgcaattgttatatcccangnatcaatgatactcanactgagatcctggaaaatgtcctttatgatgagatattgaatgtaaccatgaaagtcactaaatctttctgcatcattgtacatctccctgatgttntctgtnttgatgataaccatantgtctgggnttctcagaagaagatnctgaatggctttgtggacgttgagggcccttcggatanaaacatcaatgggnaagggtctgaaatgcntggcccaggg

SEQ ID NO: 2077 - DNA, 520 bp, homo sapiens
  misc_feature (47)..(47): n=unknown
  misc_feature (305)..(305): n=unknown
  misc_feature (430)..(491): n=unknown
gaatggtgttatctaccagaccttctgtgacatgacctctgggggtngcggctggaccctggtggccagcgtgcacgagaatgacatgcgtgggaagtgcacggtgggcgatcgctggtccagtcagcagggcagcaaagcagtctacccagagggggacggcaactgggccaactacaacacctttggatctgcagaggcggccacgagcgatgactacaagaaccctggctactacgacatccaggccaaggacctgggcatctggcacgtgcccaataagtcccccatgcagcactggaganacagctccctgctgaggtaccgcacggacactggcttcctccagacactgggacataatctgtttggcatctaccagaaatatccagtgaaatatggagaaggaaagtgttggactgacaacggnccggtgatccctgtggtctatgnttttggngacgcccagaaaacagcatcttantactcancctatggccagcgggaattcactgcgggt

SEQ ID NO: 2078 - DNA, 250 bp, homo sapiens
  misc_feature (248)..(248): n=unknown
gctactgggtaagttgttctccatccttgggatctcatggttgggaggagaggtctgggttccctcccacaaaactctcaacgatagaatagaagcacagctgcctcagttatctcacggctgctgctgtaaccaacatgagttccatatccactccaatcaaaaccagaaaaatctccacactgctggggactggcctctggaaagtatcctcctccaccaatgcagtggtgctcagtgttacatcngg

SEQ ID NO: 2079 - DNA, 525 bp, homo sapiens
tcatcttctcaccatgaggctccctgctcagctcctggggctgctaatgctctggatacctggatccagtggagatattgtgatgacccagactccagtctctctgtccgtcacccctggccagccggcctccatctcctgcaagtctagtcagagcctcctacatagtgatggaaagacctatctgtattggtacttgcagaggccaggccagcctccacagctcctaatctatgaggtgtccaaacggttctctggagtgccagataggttcagtggcagcgggtcagggacagacttcacactaaaaatcagtcgagtggaggctgaggatgttggcattttttactgcacgcaaagtatacaacttcctctcactttcggcggagggaccaaggtggagatcagacgaactgtggctgcaccatctgtcttcatcttcccgccatctgatgagcagttgaaatctggaactgcctctgttgtgtgcctgctgaataacttctatcccagagaggccaaagt

SEQ ID NO: 2080 - DNA, 149 bp, homo sapiens
  misc_feature (42)..(142): n=unknown
aacattagcataattaaagccaaggaggaggaggggggtgangtgaaanatgagctggaggaccgcaatangggtangtccccnntngaaaaaaggnnanangncnaaagattggaaggggtnaagctngaacttaagaacnagttggg

SEQ ID NO: 2081 - DNA, 438 bp, homo sapiens
gcaacttcctggattatcctcgccaaggactttgcaatatatttttccgccttttctggaaggatttcgctgcttcccgaagtcttggacgagcgctctagctctgtgggaaggttttgggctctctggctcggattttgcaatttctccctggggactgccgtggagccgcatccactgtggattataattgcaacatgacgctggaagagctcgtggcgtgcgacaacgcggcgcagaagtaagtagccggggctgccgccgcctgaggtcagccgggacgggatgggtcgggttgggccgggccgggagcggaacgtagcacccggtggtccgcccgtcactgatccctctttcctggtctcaggatgcagacggtgaccgccgcggtggaggagcttttggtggccgctcagcgccaggatcgcctcacagtgg

SEQ ID NO: 2082 - DNA, 230 bp, homo sapiens
  misc_feature (38)..(219): n=unknown
gtacagcagcctgaaagtaagttccttcagggacgtgnagactgttgcctggcaggtgggngggatgtgaacatctttttgaagaaagaganntatcaccccnaactttcctnctctcctttctcttacagaagggcaagaaatgcagcaagaccaagaaatcccccgaancagtcangtttacttacgctggatgtttgagtgtgaagaaataccggncccagtatgcg

SEQ ID NO: 2083 - DNA, 445 bp, homo sapiens
  misc_feature (295)..(364): n=unknown
aaaatcttttcactgaatataaaattaaaatcatttacaaattattccagtattacatttcccctccctccccaaaagctacattttgataaataaaacattcagtcttaaaacacctgatttctgtttgcagtttagagtgcagatagctgcctctcacagacactcatggagtgtcccccttcaggaagggatggaatgccctcccatttacttttgtcaaaggacgaataaaagctttaaactgtccaactaatcttattatctcttttacgactgtagaaccccaaaaggnnnaaagcctagagnaaatatgcttagcaaataatttacaaacagnaaacaggaagtcatcaactccacnagctccaaaatgaagcagtaacatgtgctccaatactatgaagcaaagtattctccaatcgtgggctgcattagtgtccat

SEQ ID NO: 2084 - DNA, 559 bp, homo sapiens
  misc_feature (218)..(483): n=unknown
gccacaccctgcacccaggcccctgaacccctgagacttcatgacagccctgggtgtccacccagaaaaacatgcactgtgtttgtagctcatatccgtgggtctgcaggtgagtcacacccttatcttcaagttaaaaacaagagcagcaaatataataataagaagaagccctgcaggtattatcttaaatctcaaagcaatcctattgaacagannnnnnnnnnnnnnnnnnnnnnnnnnnnnnnnnnnnnnnnnnnnnnnnnnnnnnnnnnnnnnnnnnnnnnnnnnnnnnnnnnnnnnnnnnnnnnnnnnnnnnnnnnncagttgattccagtccataggcctgtgccagtcattgttatgagccttttgcaactactgtcttcacaattcccctaagagatggggaaaaccaaggtgcacagctgggatccaaacccaggcctgtctgacagcaaagcactgtgtctggactttggngtaaggtgcctggggttcaaatgccaggtctactcagtctctccttacttgctgtctgacctggacaagtcacctg

SEQ ID NO: 2085 - DNA, 498 bp, homo sapiens
  misc_feature (192)..(192): n=unknown
  misc_feature (496)..(496): n=unknown
gacagatgtccacgctgcccgcgactcctgagcacactcccatggcgggtggcgtgctctgggtgggtgtgcggcagtggccggtcagggtgtagggaaggggactgagaggggaccttggtgagcttgcatttgtgtggggatacacgtgaaggggtgtctgatcccaggactcagggcctcttcctcctngggggcacacagagccccttcccttcctcctcggggaacagccccggaatggggccttcccttggtgcctctaggtcctgccctccagcccatgtccccagaaggtggtctttccttggaggggtcagagactatagcccagggctctggggtcactgtgggaacatctgcctcagctcggcacgcacttctcctggcctgtttcttccactgggaactgggaccctaacccctcaaagggggatccctgagcgagggtcatgggcagggagctggtatggacgggtgtgtgcggggaggggtnac

SEQ ID NO: 2086 - DNA, 426 bp, homo sapiens
gtcgtcaacgtggagatcgtggaggagcccgtgagttatgtcagcggggagaagccggaggagttttccgtcccattcaaagtggaggaggtcgaagatgtgtcgccaggcccctgggggttggttaaggaggaggaaggttatggagaaagcgatgtcacattctcagttaatcagcatcgaaggaccaagcagccccaggagaacacgactcacgtggaagaagtgacagaggcaggtgattcagagggcgagcagagttattttgtgtccactccagatgaacaccccggggggcacgacagagatgacggctcggtgtacgggcagatccacatcgaggaggaatccaccatcaggtactcttggcaggatgaaatcgtgcaggggactcgaaggaggacacagaaggacggtgcagtgggc

SEQ ID NO: 2087 - DNA, 481 bp, homo sapiens
  misc_feature (268)..(342): n=unknown
  misc_feature (452)..(452): n=unknown
cattgtagggaacaggagtttagcaaaatcagcttcttagatgatgtcattctaaatatacatcttaaacaaacaatatcaaaaccaccagtaggaaactgaaaaacactcagtgagtactgttttgtctcagtaacaataaatacaaaaagactggttgtgttccggccccatccaaccacgaagttgatttctcttgtgtgcagagtgactgattttaaaggacatggagcttgtcacaatgtcacaatgtcacagtgtgaagggnacactcactcccgcgtgattcacatttagcaaccaacaatagctcatgagtccatacttgtaaatacttttggnagaatacttcttgaaacttgcagatgataattaagatccaagatatttcccaaagtaaatagaagtgggtcataatattaattacctgttcacatcagcttccatttacnagtcatgaggccagacactgacatcaaac

SEQ ID NO: 2088 - DNA, 368 bp, homo sapiens
  misc_feature (2)..(71): n=unknown
tngntngctgggtggggngcgtgggtgggggtccgcctataattatctggggaaatgcatccgatctctanttttcgctgcggcactccgagggcacctccggttctcccccatcctccgggagtgtctgggcgctcagtccgctctgatcccgccgaaaccacctgcggttggcaggcaggagactaggcgtctgccggggagggcagggacccgctaagctgatctcctgtacagtagtgctacttaaaatatgctggggaccatcaccatcacagttggacagagagactctgaagatgtgaacgaaagagactccgataaagagatggctataagtcagcggttgttcacgacatcacagatga

SEQ ID NO: 2089 - DNA, 265 bp, homo sapiens
  misc_feature (29)..(29): n=unknown
  misc_feature (258)..(258): n=unknown
  misc_feature (359)..(359): n=unknown
  misc_feature (518)..(518): n=unknown
tgctgcacctcggctaagcccttttccanacacgtgatctcctcgggctcctcaggggatgaggcagagctctcgcccttttgctcctcctggctgtccggagaatcggctggaacctgagtgtgctcccctgattcctcgtctcctcctcctcttttccctttctgtttctttccagaaagcttttttaagccagtgctggtaaaaagcttctttagtggacttccctgcaccttcattctctcctgtgatgacagnatttcca

SEQ ID NO: 2090 - DNA, 452 bp, homo sapiens
tgaaggctaaaattttggccagaacattacaaaagttttaaatcgtagacgtaactccccctgaaataaagttaggtagtaaaatccttaatgaaaccagtggatgtgcttaacgtaaggttagtaaagcatacaaagaatctagtgtgctcagggcttggtacaatgagctgaattagatggccttatgaaactctttctaacctcttacccaacctgtttctccttggttaaaattatacttgaaggcccagaacactcatggcacatttgtttaatattgcttatagttagtttaaggtaattttgcttctacagtattttggaaggtctgaaaacttgcacagggtcatctttgtaattatataaccccaaactaagatgcacaatgtctccttcaggtgatcacacacagtggacgagtatgtgcaaacatggacataatagttcac

SEQ ID NO: 2091 - DNA, 531 bp, homo sapiens
  misc_feature (359)..(359): n=unknown
  misc_feature (518)..(518): n=unknown
tttatgatttacacagaaaatgatgggctggggttatagaacaataaaccaaccattacatttagacctgggcttttgaaaaacttgcattccattttaacaattcgtatgtatctaacaaatacataaatccagatcacaaataatcttaagagttaaacaattaagaaacacaaagaataccacatagatctacctttaaatatcagcattcatattataagaaataagaaaatgttaaaaaaataaaattaggttaagtcacaacataaaatagagaaataagataaatgctattttattaatattcatacttatttctaatttaccttcatatagtcttaactttttcaaaaggntccaagatatgatcaaataatattttagtatctgaacttgccagccttagcttataccagagcttgttaccatgaaaatcctaaaacctcaattttctttttcttttttaaaatttaaggccaactcttattccacttttcttcttcacagccagctgnttataggtaggta

SEQ ID NO: 2092 - DNA, 422 bp, homo sapiens
  misc_feature (140)..(140): n=unknown
ggggacggttgctgagcgggcctgggacagcgggtcgcggcacctccggcctgcgcgtgtctaatccgtctgtcgggtcccgaaagagctaagccgagcctgcgccggacgggtgggctggactgagagaattctctganctggtgacaggtgccacaggcatggggatctcaccagaaaggaaccgacggagctaggggccagcgagatggcggacgaggccttagctgggctggatgagggagcccttcggaagctgctggaggtcacagcagatctggcagagcggcggcgcatccgctcagccatccgggaactgcagcggcaggagctggagcgcgaggaggaggccctggcatccaagcgtttccgtgccgagcggcaggacaacaaggagaactggctgcactctcagcagcggg

SEQ ID NO: 2093 - DNA, 539 bp, homo sapiens
  misc_feature (482)..(482): n=unknown
gagggtgtcgcaacagacagggcagcggtgggcggacgcacaggcaggagacggtgcccggagagtgggggcggcagcttgccactggctggccatgcgggcgggcaggctagacattcttgccgcgcaggcgcagttcgtggcgtcgcaggtggttgtagagcgactgcacataggtgaagacacacttggggtcaggcttcttgcccatgatcatcatgtcgtccacctccaccaggggcacacagtccaccagcatccgtggggccccgagcaggggttaggactttttggtttttaccagccccttctggaccagacagcggtagaattcctggatgtacgtgtacacgcacttccagtcaggctctcgaagccgcaccatgtcctctgtatccaggagctgcgggcagtccgcatgggtctccgcagatgagaaggccacctcgaagttctggcgtcggttctgagggctaagctgnccatagtcgaaggcctcagggaagaagttgtgcaccaggggacagaaggccatccca

SEQ ID NO: 2094 - DNA, 325 bp, homo sapiens
  misc_feature (190)..(271): n=unknown
tgtgtttgacttcagcggcactgggccggaggtgtttggtaatctcaacgcaccgcgggccgtaaccctgtccgccctcatctactgcctgcgctgtctggtgggccgcgacatcccactcaaccagggctgcctggcgccagtgcgcgtggtcattccccgaggctccatcctggacccgtcgcccgangcggcggtggtgggcggcaacgtgctcacgtcgcagcgcgtggtggatgtcatcctgggggcctttngggcctgcnccgcntcccaggggtgcatgaacaacgtgaccctgggcaacgccacatgggctactaac

SEQ ID NO: 2095 - DNA, 234 bp, homo sapiens
  misc_feature (84)..(90): n=unknown
tgtaagaaaaaagttcctagagcatgataaaccttggtttctggcacaggataaacctttcatttcatggtgtacatttcacannattnnaaaaccccagcctggttttcatgattaaagccgtggggaaaggacaatgtttccagggagcaacgactcgcaagcacacccctggggctgtgcggtggccgtcggcggggccagcttcaaagtccaacccacaagggcacggtt

SEQ ID NO: 2096 - DNA, 443 bp, homo sapiens
cccaagcgccttctccgcaccagggaagccccacccaccagaagccaagatgtccagcaagcgggccaaagccaagaccaccaagaagcggccacagcgggccacatccaatgtcttcgcaatgtttgaccagtcccagatccaggagtttaaggaggctttcaacatgattgaccagaaccgtgatggcttcatgacaaggaggacctgcacgacatgctggcctcgctggggaagaaccccacagacgaatacctggagggcatgatgagcgaggccccgggggccatcaacttcaccatgttcctcaccatgtttggggagaagctgaacggcaggaccccgaggatgtgattcgcaacgctttgcctgcttcgacgaggaagcctcaggtttcatccatgaggaccactccgggagctgctcaccaccatgggtgacgg

SEQ ID NO: 2097 - DNA, 444 bp, homo sapiens
  misc_feature (444)..(444): n=unknown
gatgtccacgctgcccgcgactcctgagcacactcccatggcgggtggcgtgctctgggtgggtgtgcggcagtggccggtcagggtgtagggaaggggactgagaggggaccttggtgagcttgcatttgtgtggggatacacgtgaaggggtgtctgatcccaggactcagggcctcttcctcctggggggcacacagagccccttcccttcctcctcggggaacagccccggaatggggccttcccttggtgcctctaggtcctgccctccagcccatgtccccagaaggtggtctttccttggaggggtcagagactatagcccagggctctggggtcactgtgggaacatctgcctcagctcggcacgcacttctcctggcctgtttcttccactgggaactgggaccctaacccctcaaagggggatccctgagcgan

SEQ ID NO: 2098 - DNA, 371 bp, homo sapiens
gcttgttcgtctcactggtgtgagctccagcatcccctttgctcgaaatggaccccaactgctcttgcgccactggtggctcctgcacgtgcgccggctcctgcaagtgcaaagagtgcaaatgcacctcctgcaagaagagctgctgttcctgctgccccgtgggctgtgccaagtgtgcccagggctgcgtctgcaaaggggcatcggagaagtgcagctgctgtgcctgatgtgggaacagctcttctcccagatgtaaatagaacaacctgcacaacctggatttttttaaaaatacaacactgagccatttgctgcatttctttttatactaaatatgtgactgacaataaaaacaattttgactt

SEQ ID NO: 2099 - DNA, 339 bp, homo sapiens
  misc_feature (330)..(330): n=unknown
ataaaaagaaatgcagcaaatggctcagtgttgtatttttaaaaaaatccaggttgtgcaggttgttctatttacatctgggagaagagctgttcccacatcaggcacagcagctgcacttctccgatgcccctttgcagacgcagccctgggcacacttggcacagcccacggggcagcaggaacagcagctcttcttgcaggaggtgcatttgcactctttgcacttgcaggagccggcgcacgtgcaggagccaccagtggcgcaagagcagttggggtccatttcgagcaaaggggatgctggagctcacaccagtgagacgaacnagcctcgag

SEQ ID NO: 2100 - DNA, 442 bp, homo sapiens
  misc_feature (368)..(432): n=unknown
gtggtatcacaagtcccaagccttcccttgcctgaccaatacccaccaagtcaaatcacagaccttgatgccacagttcatgaggataagattattcttacatggacagcaccaggagataattttgatgttggaaaagttcaacgttatatcataagaataagtgcaagtattcttgatctaagagacagttttgatgatgctcttcaagtaaatactactgatctgtcaccaaaggaggccaactccaaggaaagctttgcatttaaaccagaaaatatctcagaagaaaatgcaacccacatatttattgccataaaagtatagataaaagcatttgacatcaaaagtatcccaacattggcacnagtaactttggttatccctcaaggcaaatcctgatgacattgattctacanctaactcctactnctactcctac

SEQ ID NO: 2101 - DNA, 511 bp, homo sapiens
gactactcagatagatgattttaatttcttgatgcaatttgaaatatcatttcagaaaactgttgcatcaaataatatacaaccaggtatcagtatgaaaaaggatctttgttcatcactatttcttacaaataaaataacaaataaatgaaactattaaattttaatcttgacagtttttacatatccatgagtgtttttatttaatcaaagtatccttttccgacatcttaaaattatttttatgagtttatgatcacacatgggatgaattttaagattcagaaatatcctttacttacattgttttgttttttaaaactctcttctaggtctacttgaagatttttttcttcgttaaggttcaaatggtggtacttaaaataaagttaacaattacaacagacccaatcacagacaataccagcgtagaaatattaactccagaattatgacttttatcaggagtaggagtagggagtaggagtaggtgtaggatcaatggccattc

SEQ ID NO: 2102 - DNA, 368 bp, homo sapiens
  misc_feature (99)..(122): n=unknown
ccaagacaggcatctcaaatcggctgattctgcatctggaaactgccttcatcttgaaagaaaagctccaggtcccttctccagccacccagccccaannnnnnnnnnnnnnnnnnnnnnnnttccgcactggctggcctcttcggtgcggcagagggacaagcatttcatcttgggaagtgccccaatcctccggtgcaggagaattttgacgtgaataagtatctcggaagatggtacgaaattgagaagatcccaacaacctttgagaatggacgctgcatccaggccaactactcactaatggaaaacgggaaagatcaaagtgttaaaccaggagttgagagctgatggaactgtgatcaaat

SEQ ID NO: 2103 - DNA, 530 bp, homo sapiens
  misc_feature (70)..(99): n=unknown
acagggtagggcatggttacatgtttaggtcaacttcctttgtcgtggttgattggtttgtctttatggnngggggtggggtaggggaaagcgaanagnaagtaacatggagtgggtgcagcctccctgtagaacctggttacgagagcttggggcagttcacctggtctgtgaccgtcattttcttgacatcaatgttattagaagtcaggatattttttagagagtccactgtttctggagggagattagggtttcttgccaagatccaagcaaaatccacgtgaaaaagttggatgatgcaggtacaggaatacacgagggcatagttctcatagtcggtggccaggatccagtacggtgccgatggcataaaccaggaaaacttaacttccagcttggcaggctctgtgaggttaactggggtggcttcaccttcgatttgattcacagttccatcagctctcaactcctggtttaacactttgatctttccgttttccattagtgagtagttggcctgatgcagc

SEQ ID NO: 2104 - DNA, 357 bp, homo sapiens
  misc_feature (35)..(62): n=unknown
  misc_feature (164)..(164): n=unknown
ggcctgagtactcccgtcggaggggatggacagtnaaccctcccgttggtttccaanaccnncccccttcccaaggcaactctggagggtaccctaggtatgctgctgagccctgccccccgtcctgctccagcctgcccgtgtgtaacctgtaagatgtactntgtgcctccggaagacaccacctttcccttcagcattccctttcatgacctgaggcactctgcgatgtgtgccccaaagcagaacttacagggcctgcaggaagctggtgtcagggagagaaacccaaccccactgtcaacatagggagcatcaccaactccagactggctcctgtgggtatggtgtttccgc

SEQ ID NO: 2105 - DNA, 391 bp, homo sapiens
  misc_feature (43)..(207): n=unknown
  misc_feature (321)..(350): n=unknown
aaaaagaaagtgctctcattacaaacgccactgtcacatccanatagtatgccagtcgctgcaaaccaaaccgcgtgtgtccgctgggtctctgggcatgcagtttgctcccantgcgggaatggggtgggggcaggccgaacctgggctctgggggctttgctgggggagcttctggtcctgggggnacccacttgtgagggagtngggggacagctggaatagcgttgctcagtgcgtcctttgggcgctgttggggacacccggctctatgttggaccctgtagcactacagatcggagggtccccttccccccaatnancnccccgccagtntgcnctctccaaantctaaccctgtagaggttgagttctacaggggcttgaggat

SEQ ID NO: 2106 - DNA, 351 bp, homo sapiens
  misc_feature (319)..(331): n=unknown
gcaagtcatcggggacagagtccccaagtgggtgcacgtgttaatcggaaaagtggtcctggagctggagcgcttcctgccccagcccttcaccggcgagatccgcggcatgtgtgacttcatgaacctcagcctggcggactgccttctggtcaacctggcctacgagtcctccgtgttctgcaccagtattgtggctcaagactccagaggccacatttaccatggtcggaatttggattatccttttgggaatgtcttacgcaagctgacagtggatgtgcaattcttaaagaatgggcagattgcattcacaggnactacttttatnggctatgtaggattatggac

SEQ ID NO: 2107 - DNA, 425 bp, homo sapiens
  misc_feature (23)..(417): n=unknown
gacattttattacttaattatgngacattaagaaataatttggntgcatattatnttcaaaaagcagtaagaaagnagctattgagaaagaaggacngccataggttnttcaatannacgttagnaacattataaanaacgagncncccattacntggnaacacatnatcnaanatcngacnancncacattcnaacaggcttgnttcgaaatagantnctccanttcnttcagatgagcctttnttcttaggctcnttcagaagcacttcacaatnaacagangtcttgccanctcanttcattagcggagnagcaaaggtatgnnggcagnatcatgagaagatggaaataacgcctgaggatanggcttganctctganancaatnatctttgagttattcacgccaggatagnagcttaga

SEQ ID NO: 2108 - DNA, 441 bp, homo sapiens
  misc_feature (434)..(434): n=unknown
atttatttaaaggctaaaatttgtttttttattctttgcacaattgtttcattgtttgacacttaatgcactcgtcatttgcatacgacagtagcattctgaccacacttgtacgctgtaacctcatctacttctgatgtttttaaaaaatgacttttaacaaggagagggaaaagaaacccactaaattttgctttgtttccttgaagaatgtggcaacactgttttgtgattttatttgtgcaggtcatgcacacagttttgataaagggcagtaacaagtattggggcctattttttttttttccacaaggcattctctaaagctatgtgaaattttctctgcacctctgtacagagaatacacctgcccctgtatatccttttttcccctcccctccctcccagtggtacttctactaaattgttggtcntgttttt

SEQ ID NO: 2109 - DNA, 529 bp, homo sapiens
  misc_feature (117)..(121): n=unknown
aactgtatacacagcttatagaacttttatgtaaacatcataagctcaccattttgtcatttgtcagtttatttaaaaaataaaaaacaagacaacaatttagtagaagtaccactngnnnggaggggaggggaaaaaaggatatacaggggcaggtgtattctctgtacagaggtgcagagaaaatttcacatagctttagagaatgccttgtggaaaaaaaaaaaataggccccaatacttgttactgccctttatcaaaactgtgtgcatgacctgcacaaataaaatcacaaaacagtgttgccacattcttcaaggaaacaaagcaaaatttagtgggtttcttttccctctccttgttaaaagtcattttttaaaaacatcagaagtagatgaggttacagcgtacaagtgtggtcagaatgctactgtcgtatgcaaatgacgagtgcttaagtgtcaaacaatgaaacaattgtgccaagaataaaaaaacaaattttagcctttaaataaatcggacgcg

SEQ ID NO: 2110 - DNA, 89 bp, homo sapiens
ccactgcccattccattcacccctcactgtacctgccctagaacctgggcctaggccacaggggcagggagaagagaaggcattagtaa

SEQ ID NO: 2111 - DNA, 389 bp, homo sapiens
gccaaggagacagcctcagaagctattttgcaacctggtaccagcagaagccaggacaggcccctgtagttgtcatctatggtaaaaacaaccggccctcagggatcccagaccgattctctggctccagctcaggaaacacagcttccttgaccatcactggggctcagacggaagatgaggcttactattactgtaactcccgggacagcagtggtaaccttcattgggtgttcggcggagggaccaagctgaccgtcctaggtcagcccaaggctgccccctcggtcactctgttcccaccctcctctgaggagcttcaagccaacaaggccacactggtgtgtctcataagtgacttctacccgggagccgtgacagtggctgga

SEQ ID NO: 2112 - DNA, 388 bp, homo sapiens
  misc_feature (182)..(388): n=unknown
tgagtgcagggagaagggcttgatgccttggggtgggaggagagacccctcccctgggatcctgcagctctagtctcccgtggtggggggtgagggatgagaacctatgaacattctgtaggggccactgtcttctccacggtgctcccttcatgcgtgacctggcagctgtagcttttgtnggacttccactgctcangnntnaggntcangtanctnctggnngcgtacttnttgttgctttgtttggagggtgtggtggtctccactcccgccttgacgggnctgctatctgccttccaggccactgtcacggctcccgggtagaagtcacttatgagacacaccagtgtggccttgttggcttgaaactcctcaagagganggn

SEQ ID NO: 2113 - DNA, 365 bp, homo sapiens
  misc_feature (17)..(99): n=unknown
gaattgttgcatatggnttatataaactgaaagagccgggggaaatactaaaatgtcccattcatctggattccacatgcgtgtggcagcccaagggcnttgttgtaggagcaatgactgttggtatggggctattccatgtatcgggaattctgggcaaaacctaagccttagaagaagagatgctgtcttggtcttgttggaggagcttgctttagttagatgtcttattattaaagttacctattattgttggaaataaactaatttgtatgggtttagatggtaacatggcattttgaatattggcttcctttcttgcaggcttgatttgcttggtgaccgattactagtgactagtttac

SEQ ID NO: 2114 - DNA, 513 bp, homo sapiens
  misc_feature (493)..(493): n=unknown
atgttaacaccatggaatgcaaattcagattagacaagagaatttcacaagtgtgatagccttctgtatattatataaaagtttgggtatactgtctggccaaaccagcttgctcataagtcattaaccaaatccattataggtaatttgttcagttcaatgtttacaattcttatggaaaaaattagcaacacacacatttaaaacgtgttcatttacctttgcgtgagtgcttaaaatacatatttctatttcaagatgacatttaaaaattattctaatatatcagcagcaaaaatataatttgcaattacaaaaaactaaactagaatccttaagttattctcatgtttacagttgtgattctttaataaatactattatgcagctctattgtttaagctttctggatttggtttaaacacatgcatatatattgtcaattgtgggaagctttacaaggttatattccatgcactttttgggccagagntctaaccagagccagccagt

SEQ ID NO: 2115 - DNA, 380 bp, homo sapiens
  misc_feature (275)..(275): n=unknown
aaaatttgttttcaatgcctgtgcctcagctgctgtcacaaatacccatcttaggatcccatcagcttcccatcccccaccagacagccacagtaccctcactttctccctattgttctttcaaatcctgttctcaggaaagaaactgccactaattcattcacactaaggtgtaaatgattgataataggaatgagttacctcttcccacagacatttgtttttaagtatgacagagcagggccttaatcccaagggaaaaggttatggaactngagggggtgagctttctgggtagaaggagacttcctgaatttccttaaaacccagtaagagtaagacctgttgttttggaaggtctgctccaccatctaagagca

SEQ ID NO: 2116 - DNA, 342 bp, homo sapiens
acagcaaatgtagtaattcaacacatctatttatcaaatcaatccactgcaatgaagaaaaataaatgaacagaaaaatctatgtctgcataggacatgctctcagtgtgtaatttaaatggcaatactttaaattaattggttatatataatgtcagttatttttctttcagaatataaccttttttgtagtaacctattctagcaataggacttaatacgactgcagataaataggactgcaaaaaccaaaaacccaaaataatgaaattaaaaagggaaaaaaaactgtaactgagatcagagttacctttcctcccccaatagaatacttatcgtaaa

SEQ ID NO: 2117 - DNA, 316 bp, homo sapiens
  misc_feature (79)..(202): n=unknown
  misc_feature (310)..(310): n=unknown
accgtcaccagcttgcagaggcaatcccctgcacccttgcagtttctcttttgctcttgcacgtccttttttgcaaacnncccccttgcacggtggnccctcccctgtccccggctgacccatccctaccctttggccccctcagggacccagacagcgtggtcctctgcctcttggccattnnnnnnnnnnnnnnnnnnnncatcgccctgcaaatccattcacgtcatccagtccttctgctgtgacaacgacatcaacatcgtgcgggtgtcgggcatgcagcgcctggcgcagtcctgggagagcnggcgag

SEQ ID NO: 2118 - DNA, 501 bp, homo sapiens
  misc_feature (455)..(464): n=unknown
tgaatacaagccacactccatcatatcccttaaacttcatgaaaaaccattcaagatccccttgctgcaacactgttctcttcttctctactaaattctatttccaaaattggtaatagagccagaaggatccccagtacccagccctctgcctggcacaaagtggtagcacaattaaattcagtatgggtggagcatggtacagtcttggtgccatagaaggagtagttgcatagtcacacatcatttgataagttggatgttccattacatagaggaacacaaaattccagggtttttggaggaagggattagatagtgactaagccgccagaattgaggtggccattcctttttgtataggctaagaaacaggttatcagtgaaaagttaattatggctttggcatagaatagcactgttgcaaagtatttaagcacccccccatctcagcnctttatttntctttcatgtgggctaatgtgaggataatcttacagt

SEQ ID NO: 2119 - DNA, 497 bp, homo sapiens
  misc_feature (425)..(425): n=unknown
aaaatagatgcatatttttcctacaaaattataaaatattcaggacagttaatattttttccataaatgcgctaagataaaaagatagaaatctttttcacttaaggttttcaagtaccttgtaggaattaaagaataataatgttctttcttctacattttcctaaagacatagcagttacagtttcctgctggagttatctaaaaaaggacataccaagataaattttctatcatattgaaataaaattagcataaagctttacttctgtctttgtgcttttagattggcaactgtggtcaatcagtgctgcactggaatttccaactcagcaggggaaagaatctaattaaaaatgacacacactctgtattttgtcctttagaaaacagaaactgcttgtcgatatcccttaaaaagtgcnattgccttctttgtcattctttgtaaagtctgagatgttgtttctaaacagcacagcttacatgaaaccacg

SEQ ID NO: 2120 - DNA, 423 bp, homo sapiens
  misc_feature (243)..(416): n=unknown
tgagaaagagggaatcactattcaggggtactgtatatacaatctgggtcagctgcagctggttactgcatttctccatgtggcagacagagcaaagccacaacgctttctctgctggattaaagacggcccacagaccagaacttccactatactacttaaaattacataggtggcttgtcaaattcaattgattagtattgtaaaaggaaaaagaagttccttcttacagcttggggatcnggccaaacaaaaatgcagctgccattaaagtcacagatggaacaaacttctacactgatttttaaaatcaangaanaagggcagcaagtttctggattcactgaatcaacagacacaaaaagacatcattttacaacctcatttcaaaatgaagacttttacctggaccctangtgtgct

SEQ ID NO: 2121 - DNA, 239 bp, homo sapiens
  misc_feature (8)..(227): n=unknown
ccgtccanacgggtgtagacacggccaagaccgtgctgaccggtaccaaggacactgtctgcagtggggtcaccggtgctgtgaangtggccaagggtgctgtgcaaactgggntgaaaacgacccaaaatatcgcaacaggtacaaagaanacccttggcagtggggtgancggtgctgcgaatgtggccaaaggggccgtcnaggggggcctggacactacaaantctgtcctgact

SEQ ID NO: 2122 - DNA, 243 bp, homo sapiens
  misc_feature (25)..(136): n=unknown
gtcacgtaagaatgaatgcgggcancccactgggggctgggtgcgtntgtggcgtcacaatcctggcctgtgtgtgactccccagggtcctccancagcagcctggccccaggcctgagccangcccccagcccgnctgcacgtccaggcgcaggtgaacaacagcaacaacaagaagggtaccttcacggacgacctgcacaagctggtggacgagtggacgagcaagacggtgggggccgc

SEQ ID NO: 2123 - DNA, 178 bp, homo sapiens
gactccaattgtgaataagaaatgattcgcaagtggctacaaaacagcgcgaactggaactgaagatcagctggccctgagggtccgtcacttctacacttagacggcgtgcagtgggcctcgcgtctaggcggggtcagtcaggcttctcactctcaggatctggcgtgggcacggc

SEQ ID NO: 2124 - DNA, 244 bp, homo sapiens
  misc_feature (26)..(243): n=unknown
gtggaagggtcacagaccaaacactaaggcctgagcggtgacaatcgaggcgagatgatggtcaacagggaatgcctcgtgggagaaaaaagacaattttattctcagcgctgattttgagatgatgggcttgggaaacgggcgtcgcagcatgaagtcgccgcccctcgtgctggccgccctggtggcctgcatcatcgtcttgggcttcaactactggattgcnanctcccggagnntggnc

SEQ ID NO: 2125 - DNA, 440 bp, homo sapiens
cgccgagggcggcgggctgccgcgcaagggtggcgcgcgcgcgttttccttgttcctggtcaacaaagaaatgtggagtgtcttggctgaatcctcatacagacaagatcattatggtgctgttaagtatgcctggccctcacacagtccatgggaaaccttatttttaacattactccattgagtcaataaatatttaccatctgctgtgtgcaagttactaggcaaatttctgtatccttgtccctaaaattcttgtctttaaattcattgtggaatttctttagacttcacactgacttttattactaaggtcacctttataccaactgccttcctcaaaatgcttataatgaaataacagaatcttgagttggaaacagcccaaagaaataatccaatgttgtactcagtgcagaattccctagaatttctaacag

SEQ ID NO: 2126 - DNA, 428 bp, homo sapiens
  misc_feature (232)..(312): n=unknown
gctgtctcactcatttccagttaatcatttctaaagagaaaatttacattttgtttttgttttaatgttggtcataaatttatacagttgttttttgatagaggtaagaattagactcgatgcatttttgttagaattgctgtttaaatgttaacatcagaatgcaaattaaatataaattgctttaacctttgttacaggtatactggactttctgaaaggaaaaccaggncncattaatgctagttattactttatcacagcaccagatttccattttatttatggntccnctctgggacaccactgtcngtttaataaaacaataaataattcattgcacagatccgaagacctcaggaaccagatcacaagggaaaccgattagcagcagaatttgttcatgtttggtggcagactggtggcca

SEQ ID NO: 2127 - DNA, 428 bp, homo sapiens
caagcagcagtagccagtcagaattacacacccaaaccaacagtttccacaccaacagtcaatgctgttcagcctggtgcagtgggaccatccaatgagcttccaggaatgagtgggagaggagctcagctctttgctaaaaggcagtcgagaatggagaagtatgtggtcgattcagacacggtgcaggcccacgctgctcgagctcagtctcccactccatctctcccggccagttggaagtactcctccaatgtccgagcacctcctcctgtggcctataatcctatccactcgccgtcttacccactggctgctctcaagtctcagccatcagctgcacagccctccaaaatgggcaagaaaaagggaaagaaacccctcaatgcattagatgtcatgaagcacaaccgtatcagctcaatgca

SEQ ID NO: 2128 - DNA, 455 bp, homo sapiens
  misc_feature (405)..(440): n=unknown
atagcagattgacagtgacagcagaaaaagagcaggaatacagatattttcagaagattaaaatggtactgtgtaccctcaaaccaggcaagtttttctgagaggtctctaaacatatctcctgcatagagtagatgacttttcttggagctgtcataaatgctttatagttctctacattaattcatgtcgaatattttccatggttggtcagactcagacttaaaatagatctgagaaaggtcttcaggtttactttcagtaccattattcacttcatagccagctgggtgacaacatggtgtgtggccaattcaagtttacaaggtaaccttgcctgaattatcctggtccatcgaatacaaatagtaaagtgaaggtgagagaatagaattgcaaggaacntgggagaagcagttgtcaaaaagcaaaaccaaacncaagaaaaaaaatct

SEQ ID NO: 2129 - DNA, 467 bp, homo sapiens
  misc_feature (438)..(438): n=unknown
cagacattagcatgtcagacttcgagaactccagggaatttggagccaatgacaacatgggagcctcttcgatcactcaggagacatccctcggaggaaaagaagagtttgttgccaccactgagagcaccacagagaccaaagaacccaagaaggcaaaaaggtcatccaaggaggaagccgagatggcctacaaagacttcctgctccagtccagcaccgtggccgccgaggcccaggacggcccccaggaagcctagacggtgtcgccgcctgctccctgcacccatgacaatcaccttcagaatcatgtcgatcctggggccctcagctcctggggaccccactccctgctctaacacctgcctaggtttttcctactgtcctcagaggcgtgctggtcccctcctcagtgacatcaaagcctggcctaattgntcctattggggatgagggtggcatgagga

SEQ ID NO: 2130 - DNA, 495 bp, homo sapiens
  misc_feature (442)..(442): n=unknown
ccgggcgattggcatcctcagccgcttttctgccttcaggatcctccgctcccgaggttatatatgccgcaattttacagggtcttctgctttgctgaccagaacccatattaactatggagtcaaaggggatgtggcagttgttcgaattaactctcccaattcaaaggtaaatacactgagtaaagagctacattcagagttctcagaagttatgaatgaaatctgggctagtgatcaaatcagaagtgccgtccttatctcatcaaagccaggctgctttattgcaggtgctgatatcaacatgttagccgcttgcaagacccttcaagaagtaacacagctatcacaagaagcacagagaatagttgagaaacttgaaaagtccacaaagcctattgtggctgccatcaatggatcctgcctgggaggaggacttgangttgccatttcatgccaatacagaattagccaccaaaagacagaaaaaccgta

SEQ ID NO: 2131 - DNA, 185 bp, homo sapiens
gggtgcagaactgccctcaccacccctggccaccctggcctcttgggaggaacaggcagagaggtggcttcagatggctcttggctgccactctaggcctcggggcttatacaatgagcagtgggctctaccttccaataggaagtgcaaactaattcgaagtcacacttcaccaggaaggagag

SEQ ID NO: 2132 - DNA, 422 bp, homo sapiens
atttagcctgtcaggcacccaagtggatgagggggttcgctcagccagcaagcgcatcgtggcgcccccaggcggccgttctaatatcacatctctgagttaagcaagccttcctcaaagagaggggcagaagcaagaagagattgttttgaagccaaaatggtacaccgatatttaagaaggaaagcgaatccaaacggttgtgatctaaagaatcaataagcctcaagccttatgtttctccaatgttacgctcgcttgcctagctttacgaatattgctttgttttctgtttatgcatagccttgatttgtttgactcccctccccccatttacatgcatgcaatcagaccaggccataaggtaaaagagtctgctctatcatagtgttgagagcgtgtgtagtgctgcatctttatga

SEQ ID NO: 2133 - DNA, 53 bp, homo sapiens
  misc_feature (19)..(19): n=unknown
gttattgattctttagatnacaaccgtttggattcgctttccttcttaaatat

SEQ ID NO: 2134 - DNA, 186 bp, homo sapiens
  misc_feature (40)..(127): n=unknown
ggagaacccactacaaacaaacaaacccagtccaaacaangcctccantagganaagangnnaactgcgannncacgaccccccgagaagagacgagaccaacacgctgagactgtggggcgtcacnaacctccaagtgcacggcggactgagttgtacttcgcagctctctggacattaattacc

SEQ ID NO: 2135 - DNA, 218 bp, homo sapiens
  misc_feature (150)..(179): n=unknown
gagggtagaggttcaggagagggaggagcacagtctgacattggcactgagaacgtttaacatcagtaaaacttttttttaaaagagaaattttacatatagttaaataattttttcacttggtgacaacattcaggcaaccaaaagcanaacgaantnntnnnngggatggggtgganagaaaaaggatagggggaaagaaggaaaaggggggggaa

SEQ ID NO: 2136 - DNA, 429 bp, homo sapiens
  misc_feature (146)..(267): n=unknown
  misc_feature (400)..(423): n=unknown
cctgattggggtgccaagagaaacagcaggatgttgaattgatcatcagatgccctctggaatggttagcatccaaggtgacagtgactgcattgaggcgctctattcttcttcacctctcaggaactgacttttattttttctgncaacacccagtaatctcccnaactagttttaacccttattcctccctcatacctagccatttctccaaggcgcaaatggccctggcttcatttattccnttcctttctatccttttatatntttcccttccccaccccctcactcaatggtataaaagctaggacagagcacctgacctcagttgtctttggccattgtgggaagtcattattctggagacaagaaaatcatcactctggtgccttggtggcancaccactgcctgctccctgnaangtagac

SEQ ID NO: 2137 - DNA, 204 bp, homo sapiens
  misc_feature (26)..(202): n=unknown
tagaatggtcagctaagaaattccanattgactctatccttttnntttnttgttgttttactttaaaactctaaaaattatattttggaaaagaantgctctatttccanccaaccaggagaaggaactngangatatcttnctagactgangnnttnctnaccancancntcganccgnattcnnagcttacgtangcgnnca

SEQ ID NO: 2138 - DNA, 348 bp, homo sapiens
ctcgttttttgctcggaagtaattttataaaggaatttatttttggcgtttccccacagttattcaaaggctgctctactgagaagatgaacaaatttcttgtccaaaacaatgtatttcaaacgtgcccctcgggcctttcccgtgttgctcactggtaggtcagtagatcattggagaaaatgatctgaagctcaggagtgagaattaataccagcaaccttgttgctgaatctagggatagtttcactcctatccctgaccattttccctttttgaaacactgttcctttggcttctattacatttttcttctgatttttccacctgcttctctggcttcttttt

SEQ ID NO: 2139 - DNA, 432 bp, homo sapiens
ggaaggaggtggttgtgcaggatggcgacggcggcctacgagcagctgaagctgcatatcacacctgaaaaattttatgtggaagcttgtgatgatggagcagatgacgtacttaccattgaccgtgtgtccacagaggttacccttgcagtcaagaaagatgttcctccttcagctgtcacaagaccaatatttggtatactgggcacaatccatctggtggcaggtaattatcttatagtcattaccaaaaagataaaagtaggtgaatttttcagtcatgtagtctggaaagcaacagattttgatgtcctttcttataagaagacaatgttgcacttaactgatattcagttactccagtttattaactgaagaattaacccaccaaagatgaaggtgcaaaaaaaacaaaaagcaacaactctggaa

SEQ ID NO: 2140 - DNA, 378 bp, homo sapiens
  misc_feature (249)..(271): n=unknown
taatttttgagtccaaatttttaaaataagactccctaaactgttaacattgaaagcctttggaaagcataatatatgttctggaaggttcacgctgtgtcggtctcctagcatcaatgtcagctaataaaattaaatgctaatgtgcttgaacaaccttaaaattaggcttttgtcattagaaaagtagagctattcctatgtggttaacttattaactaagatgtctatgcttttatgaattagttnnnnnnnnnnnnnnnnnnnnnnnttgtttatttaacagatccctaatcatcaaattgttgattgaaagactgatcataaaccaatgctggtattgcaccttctggaactatgggcttgagaaaaccccca

SEQ ID NO: 2141 - DNA, 366 bp, homo sapiens
ggtttgaccaggctgcacccacgaattctgttttcttttagaggtcactggagagcccggtggggtgtaagtacactgcgcttataaaactctagcaggaagctagcagctgtctccaaacccagagaaggggaaacaggaatcgattaggaataaaggattataatccactttccttctgaggaaaagctgggaaccttctcattttgccttatgaaaactaagctgaatcgactgctgccaaacatctattaggcaaaattggcctcttgcccatgatttgactttccagcacagccagttctttttctcctctgcagctgattggctctggagtgtggccagaagctctctcctgcaattaaa

SEQ ID NO: 2142 - DNA, 235 bp, homo sapiens
  misc_feature (13)..(76): n=unknown
  misc_feature (231)..(231): n=unknown
tttaaaatagtanttttacaaaatcatcncagaaaatatactanatttattaaaattcctacaaaccattgcaganaatattaaaccctctaaccaacctaacactcgctttcagaggcacttgtgatgattttcacagcttccatagttgcaaagaacaaagaaatcatcttccaacaggggtggaattagataagaataatccaaaaaatatttatttctttacagacncaca

SEQ ID NO: 2143 - DNA, 511 bp, homo sapiens
  misc_feature (152)..(152): n=unknown
  misc_feature (286)..(286): n=unknown
  misc_feature (456)..(490): n=unknown
gggggaattacccaggatgagcagggagtcctgggtcctggtgctcagaggggcagacccctgtgctctcttaatttacagagaagtattgatttggttgagtgagtgaaaggcattgaccttcattcctcctctcgcctgtgtatacagcncttcgttccctccatccctgtctgtctcagagccccagggactcgcagatgggcgaggtgggggtgtcagcgggcccttctgtccctgtgaggaccccacaagactggcccatgggccccatgcagtgcaggtnggagaggcgggggtgtcagcgggcccttctgtccctgtgaggacctcacaaggctggcccacgggccccatgcagtgcaggtgggagaggtgggagtgtcagcagacccatctgttcctgtgagtaccccacaaggctggcccgtgggccccgtgcagtgcaggtggganaggtgggggtntaacggggcattgttcctgtganggctcccatggcttcccatgg

SEQ ID NO: 2144 - DNA, 424 bp, homo sapiens
  misc_feature (397)..(397): n=unknown
gcacattgagtccccattgagtccctggtgggaaaagtccacaatttcccattgatagctttttactgttgtgaaaaagggaagcgtcagccacacaaaagcctgcatgaccgctgcttcggagaagctctcgaccctaactgcagtcactgttacttggatcagatcaagcgcagtgactttttgggattcagtggttattctccacacttcgtagccatttcaaccaactctgagcacaaaatgcagccatcctctatgcagcaagccctgcccagtcagtgaccctactggacagatccaaggccagccctggttccctgctgcagccaccgtcctgacgttcatcggagcaggccggggcctggcttcccggcacaagtggctgttctgacangcccccagtttgtcccatctgaatgct

SEQ ID NO: 2145 - DNA, 214 bp, homo sapiens
  misc_feature (40)..(40): n=unknown
  misc_feature (190)..(205): n=unknown
ctgacatctgacgacacggccgtgtattactgtgcgaganccccccttgcatcatactatgatactagtggttatttttccgactactggggccagggaaccctggtcaccgtctcctcagggagtgcatccgccccaacccttttccccctcgtctcctgtgagaattccccgtcggatacgagcagcntggccgttggnngcntcgaaaagg

SEQ ID NO: 2146 - DNA, 229 bp, homo sapiens
  misc_feature (4)..(220): n=unknown
tgcnacatctcaccccgntgacacggttantttgnatgnacacacagannggcgagccgncccgancctntgggcaggncagcanggncantagcangtgccagctgtgtcggacatgancanggacacgttgtacagggtgngtttaccgntggacttgtccacggtcctctnggngaccctgttgggcanngcctcatnggncaccacgcangtgtangtctccccc

SEQ ID NO: 2147 - DNA, 337 bp, homo sapiens
  misc_feature (280)..(280): n=unknown
agcaagatggtgttgcagacccaggtcttcatttctctgttgctctggatctctggtgcctacggggacatcgtgatgacccagtctccgggctccctggctgtgtctctgggcgagagggccaccatcaactgcaagtccagccagagtgtttttaacagcgccaacaataagaactacttagcttggtaccagcagaaaccaggacagcctcctaagttgctcatttactgggcatctacccgggaatccggggtccctgaccgattcagtggcagcnggtctgggacagatttcactctcaccatcagcagcctgcaagctgaagatgtggcag

SEQ ID NO: 2148 - DNA, 249 bp, homo sapiens
  misc_feature (169)..(169): n=unknown
aaagatgagctggaggaccgcaataggggtaggtcccctgtggaaaaagggtcagaggccaaaggatgggagggggtcaggctggaactgaggagcaggtgggggcacttctccctctaacactctcccctgttgaagctctttgtgacgggcgagctcaggccctgangggtgacttcgcaggcgtagactttgtgtttctcgtagtctgctttgctcagcgtcagggtgctgctgaggctgtaggtg

SEQ ID NO: 2149 - DNA, 455 bp, homo sapiens
gggacgtgcggaggctctcactttccgtcatggcgctgaaggtagcgaccgtcgccggcagcgccgcgaaggcggtgctcgggccagcccttctctgccgtccctgggaggttctaggcgcccacgaggtcccctcgaggaacatcttttcagaacaaacaattcctccgtccgctaagtatggcgggcggcacacggtgaccatgatcccaggggatggcatcgggccagagctcatgctgcatgtcaagtccgtcttcaggcacgcatgtgtaccagtggactttgaagaggtgcacgtgagttccaatgctgatgaagaggacattcgcaatgccatcatggccatccgccggaaccgcgtggccctgaagggcaacatcgaaaccaaccataacctgccaccgtcgcacaaatctcgaaacaacatcttcggaccaacctggactctatgc

SEQ ID NO: 2150 - DNA, 576 bp, homo sapiens
  misc_feature (548)..(550): n=unknown
gctggggtgctggagtgggaaggggaatccaaggagcaaaccaagaaggtcctagggccagcctaggcctccacggcccggccgttgatgacgcggatgtggcggatgacgtcctggatggcttcagatgttgtgccctggcccccgatgtccggagtgtgcatattctcattgtccatggatgccaggacagccttacggatggaggtggcataggagtgcagcttgaggtggtccagcatcatgcagctggccagcagggtggccgtggggttggcgatgttcttattggcgatactcttgccggtgttcctcgtagctgtttcaaacaccgcgtacacatggccatagttggccccagccacaaggcctgggcccccgaccagtcccgcgcagacattgttgacgatgttgccatagagattgggcatcaccatgacatcaaactgctggggccgggacaccagctgcatggtggtgttatccacaatcatgttctcgaaggtgatctgaaggtagcgggctgccacctccctgcaacactggangnaaaagccatcgcccagtttcatgatg

SEQ ID NO: 2151 - DNA, 201 bp, homo sapiens
  misc_feature (80)..(80): n=unknown
ctgcccgtctcggcctcccaaagtgtgtgaagggaacaaggagatatattctgggtgaagggtgatgctggctgcagatngtgagccctcagactcactagtggacatggaagatgaggaaaggggccccagcatggcagtgggaagggctggggaccttcaggttgggcccacaggggtaggagacattaccgtggggcc

SEQ ID NO: 2152 - DNA, 434 bp, homo sapiens
  misc_feature (378)..(378): n=unknown
gtcacaaagagcttcaacaggggagacagccaccctcttgtgcagggccggccagcctttgcccggcaccgcccttgcctggtttcaaaagcagcctgcccagcctcccaggctcctcgtctacggtgcatccgttagggcccctggcgtcccagacagattccgtggcagtgggtctggggcagacttcactctcactatcgacagactggaccctgaagattttgcgatgtatttttgttttcaatatgagtctttacctcacacctttggccaggggacaggctggacatcaaacgaactgtggctgcaccatctgtcttcatcttcccgccatctgatgagcagttgaaatctggaactgcctctgttgtgtgnctgctgaataacttctatccccagagagggccaaagtacagtggaaggtggataac

SEQ ID NO: 2153 - DNA, 368 bp, homo sapiens
ggcccctggacaaggacttgagtggatgggatggatcaaccctaatagtggtggcgcaaggtatgcacagggctttcagggcttggtcaccatgaccagggacacgtccatcagtacagcctacttggagctgcgcggcgctgagatctgacggctcggccgtgtacttctgtgcgagacaaaccacctcgtctcctgtaggagatgcttttgatatctggggccaagggacaatggtcaccgtctcttcagcatccccgaccagccccaaggtcttcccgctgagcctctgcagcacccagccagatgggaacgtggtcatcgcctgcctggtccagggcttcttcccccaggagccactcagtgtg

SEQ ID NO: 2154 - DNA, 436 bp, homo sapiens
  misc_feature (412)..(412): n=unknown
ctcagtagcaggtgccgtccacctccgccatgacaacagacacattgacatgggtgggtttacccgccaagcggtcgatggtcttctgtgtgaaggccagcggcagggcctcgtggcccaccatgcaggagaaggtgtcccccttcttccagtcctcggctgccacgcgcagtatgctggtcacagcgaaggtggtggtgccctggctgggctcctgccgggatgcccaagtcaggtacttctcgcggggcagctcctgtgacccctgcagccagcgaaccagcacatccttggggctgaagccgcgtgccaggcacgtcagcgtcaccagctcgttcagggccagctcctccgacggcggcggcagcaggtggacctcgggccggaatgtgtttccggattttgagaggtngcggttagcggggtcttggactcg

SEQ ID NO: 2155 - DNA, 356 bp, homo sapiens
ccaaggcctctccacttggtgatcagcactgagcaccgaggattcaccatggaactggggctccgctgggttttccttgttggtattttagaaggtgtcaagtgtgaggtgcagctggtggagtctgggggaggcctggtcgagccgggggggtccctgagactctcctgtgcagcctctggattcaccttcagtagttacaccatgacctgggtccgccaggctccagggagggggctggagtgggtctcatccattagtggcagtggcacttacaaatcttatggagacacaatgaggggccgcttcacccatctccagagacaaccccaaacagtccttgcatttacaattga

SEQ ID NO: 2156 - DNA, 405 bp, homo sapiens
  misc_feature (194)..(403): n=unknown
cggctcagtagcaggtgccgtccacctccgccatgacaacagacacattgacatgggtgggtttacccgccaagcggtcgatggtcttctgtgtgaaggccagcggcagggcctcgtggcccaccatgcaggagaaggtgtcccccttcttccagtcctcggctgccacgcgcagtatgctggtcacagcgaangtngtggtgccctggctgggctcctgccgggatgcccaagtcaggtacttctcgcggggcagctcctgtgacccctgcagccagcgaaccagcacatcnttngggctnnagccgcgtgccaggcacgtcagcgtcaccagctcgttcagggccagctcctccgacggcngcggcacaggtggncctcgggccggaatgtgtttccggantt

SEQ ID NO: 2157 - DNA, 315 bp, homo sapiens
  misc_feature (212)..(267): n=unknown
gaacaacaactggcacccgggctgcttccgctgcgagctgtgtgatgtggagctggctgacctgggctttgtgaagaatgccggcaggatctctgccggccttgccacaaccgtgagaggccaaaggctggggcaagtacatctgccagcggtgcaacttggtcatcgacgagcagcccctcatgttcaggagcgacgcctaccaacctgancacttcaactgcaaccactgtgggaaagagctgacaagccgaggcccgcgagctnaagggtgagctctaattgcctgccctgccaatgacaaagattgggcgt

SEQ ID NO: 2158 - DNA, 246 bp, homo sapiens
aaacaaacaccaggtctgcgctggccgaagacgaagcgtcctccctggaggtgggaacaagtcacctctgaccacacctcctctgacgccatcacctcctcctggccccacccaagggctcgacacaagccccaaggtcggggggagaggggcggggcggaaccgagggcggaggccaaggtgggattccaggaaggccttccgaagatggaggtgggtcctgtccctccaggtagcttgtgggtt

SEQ ID NO: 2159 - DNA, 323 bp, homo sapiens
  misc_feature (33)..(58): n=unknown
  misc_feature (290)..(290): n=unknown
aattttaagctatttattttcataaacatgaangtatttcaaagangctataagatanagcactaaatatatacattttgaagaaattaaacacagaactttgcatttacccagttctatgcaccaaacatgaacaaatacattaacaggaagaaacaggctaggaaaaaggcatatatatatagtaaatttctttacaaaagtttcttagttcaaaaagtgataaagtaatatctactcaaaactttcacaactcattttcatacgaaaatataagtatcaaatttagntatgtatcagcgtcatactaaagtatacaggcc

SEQ ID NO: 2160 - DNA, 553 bp, homo sapiens
aaagtgctataagatgcagcactaaatatatacattttgaagaaattaaacacagaactttgcatttacccagttctatgcaccaaacatgaacaaatacattaacaggaagaaacaggctaggaaaaaggcatatatatatagtaaatttctttacaaaagtttcttagttcaaaaagtgataaagtaatatctactcaaaactttcacaactcattttcatacgaaaatataagtatcaaatttagttatgtatcagcgtcatactaaagtatacaggcagtgtaagaattagtacagtacataacagagattaacaatatatttgtatacaaaacatgctcctcaaacattgaggtattattacagtacttaggtatgaacttccagtctaatactggccgcaaaagccacctctcattacccaggatgtatacaaaaggcggatgtgtcaatggtatttacagaaatgttccccaggggtatcaaatggcaaaccccttatgtggcatctgctggaacttaagcaccattttaaaaagagggatgcttt

SEQ ID NO: 2161 - DNA, 479 bp, homo sapiens
  misc_feature (134)..(134): n=unknown
  misc_feature (366)..(366): n=unknown
ctcagaattcacagccttgaggctctacagtgaaatgaaacagagagctgtgctgggagattggaagtcttctataacgggacctggggcagcgtcggcaggaggaacatcaccacagccatagcaggcattgngtgcaggcagctgggctgtggggagaatggagttgtcagcctcgcccctttatctaagacaggctctggtttcatgtgggtggatgacattcagtgtcctaaaacgcatatctccatatggcagtgcctgtctgccccatgggagcgaagaatctccagcccagcagaagagacctggatcacatgtgaagatagaataagagtgcgtggaggagacaccgagtgctctggnagagtggagatctggcacgcaggctcctggggcacatgtgtgatgactcctggggacctgggccgaagcggaagtggtgtgtcagcagctgggctgtggctctgctcttggct

SEQ ID NO: 2162 - DNA, 426 bp, homo sapiens
  misc_feature (16)..(134): n=unknown
  misc_feature (409)..(414): n=unknown
gtatttatcaatttanctgttctcctattgttcaagaaatgttatttggncaagttttccatagggcaacttgacttcctctttattcatttaaaagttgttgtctccttcaaagatatttagaggttgatctngtgagccctggaagtctaaagtcattttgtggcttcagaggcaggaagaactcccaacagcgatgtgtcgctagcatcttcacaaccatggttgggggtgtcatctgaggttcttgtcccatgtgggtcctctctcttgaggcaggtctccatctcatggaataaattctcctcgagagaacccctccttctggttgaaactctgaggggcagatgtttttgtttctgaactcggcaccacgtgagaaatagaataaacagaccaggagaagganccccnaagatactggat

SEQ ID NO: 2163 - DNA, 487 bp, homo sapiens
  misc_feature (271)..(376): n=unknown
caagggcacctgcgagcaaggtccttccatagtgacgccccccaaggacatctggaatgtcactggtgcccaggtgtacttgagctgtgaggtcatcggaatcccgacacctgtcctcatctggaacaaggtaaaaaggggtcactatggagttcaaaggacagaactcctgcctggtgaccgggacaacctggccattcagacccggggtggcccagaaaagcatgaagtaactggctgggtgctggtatctcctctaagtaaggaagangctggagaatatnagtgccntgcatccaattcccaaggacaggcttcagcatcagcnaaaattacagtggttgatgcttacatgaaataccagtgaaaaaaggtnaaggtgccgagctataaactcccagaatattattagtctgcatgggttaaaagtagtcatggataactacattacctgttcttgctaaataagtttcttttaatccaaatc

SEQ ID NO: 2164 - DNA, 546 bp, homo sapiens
  misc_feature (543)..(543): n=unknown
atgcatgcttttcttctgtaaatatataataaatttttgtagatagtcttgatgtgtgatctttattttgtatttctctgtgtaaaaccagtgaatataactaaagtgttagtggattggattaaaagaaacttattaggcaagaacaggtaatgtagttatccatgactacttttaaccatgcagactaataatattctggaggtttatagctcggcaccttcaccttttttcactggtatttcatgtaaggcatcaaccactgtaatttttgctgatgctgaagcctgtccttgggaattggatgcatggcactcatattctccagcatcttccttacttagaggagataccagcacccagccagttacttcatgcttttctgggccaccccgggtctgaatggccaggttgtcccggtcaccaggcaggagttctgtcctttgaactccatagtgaccccctttttaccttgttccagatgaggacaggtgtcgggattccgatgacctcacagctcaagtacacctgggcaccagtganatt

SEQ ID NO: 2165 - DNA, 303 bp, homo sapiens
  misc_feature (291)..(291): n=unknown
gtttatctgttgttcaacattgattcaacataagagaactcacactagtgagaaaccctatgaatgtctggaatgtagaaagacgtttaggcggagtgcacatcttattcgacatcaaagaattcatactggtgagaaaccttataaatgtaagcaatgttggaaggcctttgcttctgtttctgatttaatagacatcggaaaattcacactgatgagagactttacgaatgtacagaatgtgggaaggcatttaacaatcgctcaactcttattcagcatcagagaatncacactggtgag

SEQ ID NO: 2166 - DNA, 386 bp, homo sapiens
  misc_feature (203)..(386): n=unknown
aaaagactttctccaggtagtgtattagagcagagcagaatgcaggggttactgtgttgaacaaagggcacacatcagagagacagttgcaaactcagaatactgcgttatgggcaaaactaactggtccacaagagaaaatgagagactcgatttggctgccaggaacacctgggcctaggcaagaacacaagaggtttctnggggtngggaggaaatangtctcgctgaaggtgacagatcccttggggggcggccagctgtctggatcactgtccanggactgttgccagcccagatacctccgaggtgagtccagatcactaggagcagcagtctgtcggtnggatgcgatggatggcgatngcngtngcagcgcangtctn

SEQ ID NO: 2167 - DNA, 367 bp, homo sapiens
  misc_feature (235)..(304): n=unknown
gagcaggcacatcaaacattacaacacatgttgaaaagacaaaagggggtatacgaggccaactaccacctcaatcaaaactacatttagccttatttactgtaaattttttgactcctggtatgaatggttaagactccagcaaaaagacactggcaagcgttagaggaaaagaggaaagtttatccgaaagtgttatggaaatccccaaaagaaggacatggaaaggtgtggnggacttactgatatggggaagatggnatgcttgngtgtttacaggagatggacaaactgtgcgtgcgancatggaacgggagactggaggaacctatggtggccaaccatgagcccggtccctccggtacga

SEQ ID NO: 2168 - DNA, 410 bp, homo sapiens
  misc_feature (387)..(387): n=unknown
tgggggggagggtgtcgcaacagacagggcagcggtgggcggacgcacaggcaggagacggtgcccggagagtgggggcggcagcttgccactggctggccatgcgggcgggcaggctagacattcttgccgcgcaggcgcagttcgtgggcgtcgcaggtggttgtagagcgactgcacataggtgaagacacacttggggtcaggcttcttgcccatgatcatcatgtcgtccacctccaccaggggcacacagtccaccagcatctccgcagatgagaaggccacctcgaagttctggcgtcgggttctgagggctaagctgcccatagtcgaaggcctcagggaagaagttgtgcaccagggcacagaaggccatcccatcantccagctggaggagaagttctgg

SEQ ID NO: 2169 - DNA, 481 bp, homo sapiens
  misc_feature (259)..(276): n=unknown
  misc_feature (434)..(478): n=unknown
  misc_feature (96)..(126): n=unknown
gctgaagggtgcgaggccgcgagtggtgaactccacgtgcagtgacttcaaccacggctcagccctgcacatcgctgcttccagcctgtgcctggncgccgccaaatgtttgctggagcacagcgncaaccctgcgctgaggaatcgaaaaggacaggtgccggcggaggtggtcccagatcctatggacatgtccccggaccccccggatggacttctcccgtgtcaccggcaaaggccgcaggaacacaaaggcaanaagnagaccccatcatncccatctctgggcagcttgcagcagcgtgacggggccaaggctgaggttggagaccaggtccttgtcgcgggccagaagcaggggatcgtgcgcttctacgggaagacagactttgccccaggttactggtatggcattgagctggaccagcccacangcaagcatgatggctctgtcttcggtgtncggtacntcattgcnccc

SEQ ID NO: 2170 - DNA, 544 bp, homo sapiens
  misc_feature (505)..(505): n=unknown
tgagtttggggacatgcagtgaaggggcagtcgtgagctgtccttggtggtcggggccccaggtccgccctggaccccctgggccttcaggttctccctcgagctgttggtctggcccaggtgctgtggggtcctttgaggccagtgactagaacgtagattgaaatcggggttccaggatttgagatcccctcagggccttggggccttccatttattagagatggaggctttaggatttggggttcccttagggctggggctcttggaatttggtgtcttgaaacccatggactcggggcattgaaattctccagtttccagggatgggaattcctgtgtggggtttcctggtgcctgtgaatagggcttgaggtgtctgggagcctggaatgcatatcctgactgcagtctcctccataccaggcacaaggacctcatgattgggtttcctggggacttgggattggattttcaaatttgggattccctggggatttgggantccatgatttgggggtccctaggagttaacggcattggg

SEQ ID NO: 2171 - DNA, 318 bp, homo sapiens
  misc_feature (2)..(110): n=unknown
ancgccccggggagctcggagcgcgtgcacggtggnanacggagaaggccagtgcccagcttgaaggttctgtnaccttttgcagtggtccaaatgagaaaaaaatgganaatgggaggcatgaaatacatcttttcgttgttgttctttcttttgctagaaggaggcaaaacagagcaagtaaaacattcagagacatattgcatgtttcaagacaagaagtacagagtgggtgagagatggcatccttacctggaaccttatgggttggtttactgcgtgaactgcatctgctcagagaatgggaatgtgctttgc

SEQ ID NO: 2172 - DNA, 101 bp, homo sapiens
attgcaagggtatcgataggagcactggatttaataacactcttgcttggtgacattaccagtacatagcacgcactccacaatgccaaatgcccggaggt

SEQ ID NO: 2173 - DNA, 538 bp, homo sapiens
  misc_feature (194)..(194): n=unknown
accagccacctgtcttcttttctcttgtgactctcaatccctagggcttggtgctccctgatctaccaacagacagagatagagaagacagggagtgcacctctgtttgttcattgccttggttggacacttctgtttacatttcattggcagttattggtcacatggcccgcctaggtgcaaagaagggaganggtgcaaatttaatccttgagtggtgatcactccccccaactatggaaggaggagcaggaattgtaagggacacttagatgtctcttccattggggtcactggcgtgagtgtggaatctcaacactgtaatgtacattttcttcctctcaaagtaccttgggagcctccaatccagatcaggaattctagatgacttgatgacatgggagaatactacatgacatggaaggaattcacttattatttcagtttgatccttaagtttgaattccccaagaagcaagtccagaaacaacgatttgactgcaagtcgtttatttgtaaggtgatgctaggaaacact

SEQ ID NO: 2174 - DNA, 552 bp, homo sapiens
  misc_feature (45)..(45): n=unknown
  misc_feature (192)..(514): n=unknown
gtttaccaacgctttcttatttatttgttcttgcctcattttggnattctttgttttataatttcttttttcaagtggaagatatttcttcatttatcttttgagcatcataaatttgttttaaaatccttgctgaattgttttgtaaaatatatttcatctacagtgctgtgcaataaaataaattatatnnnnnnnnnnnnnnnnnnnnnnnnnnnnnnnnnnnnnnnnnnnnnnnnnnnnnnnnnnnnnnnnnnnnnnnnnnnnnnnnnnnnnnnnnnnnnnnnnnnnnnnnnnnnnnnnnnnnnnnnnnnnnaattttaaaagcaatcgctgattttgttagtattaggtttcctcttgtgtnttagaattttgattttcaagctcattttaagtggaagataatttattttttctgtggctgggggaagcggagttgggaaggaagtccanccttcctatttagtggttttcagtattctccactgggacagcagtctagaatttatgntctttaaatggtgttttgaagctcttgcctcagagaga

SEQ ID NO: 2175 - DNA, 467 bp, homo sapiens
  misc_feature (199)..(217): n=unknown
  misc_feature (326)..(371): n=unknown
gtgcaggcagaagggcttgatgccttggggtgggaggagagacccctcccctgggatcctgcagctctagtctcccgtggtggggggtgagggttgagaacctatgaacattctgtaggggccactgtcttctccacggtgctcccttcatgcgtgacctggcagctgtagcttctgtgggacttccactgctcaggcnnnnnnnnnnnnnnnnnnnagctgggtgtggtaaattagagatgaccacagattctttgctgcttctcccaattatgtgtttgttctatttctacaggtttgtgtggctcagaagaagagagttttancactttacatcatcccattgngatactatagaaggagtttattgnaaatttatgggggttccactctggaagtaatgtttgtcttgatgtttgatatttccatttaataattcaacgcacatttactgaaaacctattgtg

SEQ ID NO: 2176 - DNA, 501 bp, homo sapiens
  misc_feature (247)..(484): n=unknown
ctcagtggctcaaaacacaagcatttatttttgtttgcaagactgcaggctggctgggcggatctttggaacttgactaggctcaggcctctatggtcagctgagggccaggaggtcgctctgctgaccttggtgggctccttgttggcgaacatctggccagcctagatggcctctgttgggacagctgaactctcctccacatagtctctcatcctccactagcattgcctgggcttttttaganggctgtgatgacactccaagtgaagggacagaagcacacatgacggntccctgaggccaggaatcagaacgggcccaccatcactnccaccgnacananactgaccaaaacaaatcactggccagcccagattcaaggcgaggggaatagaccctaacttttggtgtgaggaactgccaaatcatgtgacaaanantggggatataagtaggagggaagnctcaagggatatttttnctaccagtatatcccag

SEQ ID NO: 2177 - DNA, 335 bp, homo sapiens
cttttagtaatgctattattgctgcatttaaagtaatgtcttttttcttttggctgcttttaatatttactctttgtgtttgttttcaacagttaaactttgatgtgcatgggtgtggttttctttcctgcctttggttcactgagcttctttatctttcattagttttagaaaattcatagccattatcttttcaaatattgctgcttcattctctctctcttcttcattaacctacgtatagtagaatttttgactatgttctgtgtgtctccaacactgtgttctgtcctttttgcccttggtttctgtgctcagtttggatttgacctgaa

SEQ ID NO: 2178 - DNA, 76 bp, homo sapiens
  misc_feature (17)..(19): n=unknown
gaatggaccactgcatnantggtcggtgtctgggttactggattttctcttctggttatgagtcatgtttttttct

SEQ ID NO: 2179 - DNA, 465 bp, homo sapiens
  misc_feature (25)..(25): n=unknown
  misc_feature (359)..(421): n=unknown
ctgagaaataagtatggtgggggcnattccctgggttcagaactactataaagatcagaaagggtgtcttattttaatttctgtcaaagtcctttatcacctggaggacaaagtaaacctggaggggtgatgtggatttatgtcttgtgtggctgatgatggtggatgttttcaggtctctctgaagaggctatcatggagctgaacctgccgactggtattcccattgtctatgaattggacaagaacttgaagcctatcaagcccatgcagtttctgggggatgaagagacggtgcgcaaagccatggaagctgtggctgcccagggcaaggccaagaagtgaaggccggcggggangatactgtccccaggagcaccctccctgcccgncttgtccctntggcncntcccaactgcanatgtcacactggaccacattctgtagacatcttgagttgtagct

SEQ ID NO: 2180 - DNA, 397 bp, homo sapiens
  misc_feature (336)..(364): n=unknown
aaattattataatgcttcagagtgttaaatagtgatatcccaaagctatctcttgggatgaacacattgaactaatagtagtgtaagatatctcaaagccatttgcaaatatgacatagggaataaaaatattacagatagtatgttttctagataatgcaataaaatgatataaaataataaagtagtgcttaacatatagtattatgaaattctttattgtctattatgaatatatttgtagaaagcatgttaaagctgctgtcattattgtaaatgaattttaacatggctatttttaaaagacagtgcagtcagttatagcagatataaaantgtaagtntctacattanngntttcaanccctgaggggttaaatttctagatttacaagta

SEQ ID NO: 2181 - DNA, 508 bp, homo sapiens
ggtcattcttccatcaaagccatcctaataattgctcttcccagtgggaactgcaaacagctacttttacatgaagttcccagaacttagtggtttccaaacaatagtactaccactgctcttgaaaataaaaacctcagtgagatcagggatgatcttaccttcttaaaattgtggtaaaggtgtttgttcacaggctaaaggaccatagctcattctctaagaatttcacctgattccaactctaccacatctgagtggtttctttctgagttttctgccttcctaacaattttgggtcttacttgatgataccaaccaaaacctaataagatttttcttgttctgtttcttcctgatatgtactgttggttagatcaaagatgaaaagattaaaaaggacaaagaacccaaagaagaagttaagagcttcatggatcgaaagaagggatttacagaagttaagtcgcagaatggagaattcatgacccacaaacttaaacatact

SEQ ID NO: 2182 - DNA, 514 bp, homo sapiens
aaagtattctcagtatgtttaagtttgtgggtcatgaattctccattctgcgacttaacttctgtaaatcccttctttcgatccatgaagctcttaacttcttctttgggttctttgtcctttttaatcttttcatctttgatctaaccaacagtacatatcaggaagaaacagaacaagaaaaatcttattaggttttggttggtatcatcaagtaagacccaaaattgttaggaaggcagaaaactcagaaagaaaccactcagatgtggtagagttggaatcaggtgaaattcttagagaatgagctatggtcctttagcctgtgaacaaacacctttaccacaattttaagaaggtaagatcatccctgatctcactgaggtttttattttcaagagcagtggtagtactattgtttggaaaccactaagttctgggaacttcatgtaaaagtagctgtttgcagttcccactgggaagagcaattattaggatggctttgatggaagaa

SEQ ID NO: 2183 - DNA, 577 bp, homo sapiens
gttctgttgaagaatgtgaagcaccctttcctggtgggccttcacttctctttccagactgctgacaaattgtactttgtcctagactacattaatggtggagaggtgagcaggggggatagaagtcaactcttagtgtctctgcacagcctgctttgttttagtttgagaaaaaagttttcaaagatttttggtggggagaatgttaccagaattagcatttccttcaacctgtcaggtttatagttaatagattacttggggccacttcctgcagttgttcttttgctgtgtatgtcaaaactaattaaattcatttgcaacccagaatgactttgttctgtctcctgcagttgttctaccatctccagagggaacgctgcttcctggaaccacgggctcgtttctatgctgctgaaatagccagtgccttgggctacctgcattcactgaacatcgtttatagagacttaaaaccagagaatattttgctagattcacagggacacattgtccttactgacttcggactctgcaaggagaacattgaacacaacagcacaacatccaccttctg

SEQ ID NO: 2184 - DNA, 309 bp, homo sapiens
  misc_feature (16)..(62): n=unknown
  misc_feature (186)..(249): n=unknown
cctgactggacatcangacgcagcttcactctgntcctggtatttattcacctctttcagtngttgccaggagttttcaccccaaccctttgtctccacccctaaggactcagccccctactgctggtcccagcctagaaagctcactttgtgttctctcctgtctaacagagtctggcggagacnacagcgtgtttgacntctttgaantcaccggggccgcccgcaanggtctgggcgccgactggngaagggccccgacccttccagcccagtttccgcatcgaggatgccaacctgatcccccct

SEQ ID NO: 2185 - DNA, 252 bp, homo sapiens
  misc_feature (3)..(3): n=unknown
  misc_feature (151)..(207): n=unknown
tanggtgttcatccaaaagttcagcaatggcttcttcatctgctgattgaagcagtctctgaattagctgatccaggcccttcccaccacataaaaattccttaatatcacgaacttcatatgctatcctgtggtcactgactctatcggnnngnccnnngccgangcgntntgcnnngcngnganggggntcgtgttcccacctgnggggatgtggacaagtctgacggcactatcagttttattaacatg

SEQ ID NO: 2186 - DNA, 371 bp, homo sapiens
ccttgataaagggaaaggaattatgatggcccagacccttgaccagatctcggtctcatgttgaaattagaagtatgtcttattgaccctgacctgtcttcctctccttctaggtgacttgcttttggagggcttcaacaactacaccttcctctccaatggctttgtgcccatcccagcagcccaggatgatgagatgttccaggaaaccgtggaggccatggcaatcatgggtttcagcgaggaggagcagctatgtaagcctcacaccttgagtctggagggtagcttgcctggataccagtggaacctgttaagaactcttctctggtcaggacagatttctgctctctgaattccccaccttccat

SEQ ID NO: 2187 - DNA, 287 bp, homo sapiens
tgaccagagaagagttcttaacaggttccactggtatccaggcaagctaccctccagactcaaggtgtgaggcttacatagctgctcctcctcgctgaaacccatgattgccatggcctccacggtttcctggaacatctcatcatcctgggctgctgggatgggcacaaagccattggagaggaaggtgtagttgttgaagccctccaaaagcaagtcacctagaaggagaggaagacaggtcagggtcaataagacatacttctaatttcaacatgagaccgaga

SEQ ID NO: 2188 - DNA, 538 bp, homo sapiens
  misc_feature (17)..(17): n=unknown
  misc_feature (503)..(532): n=unknown
caccaatatcatatttngcctccgtggacattcggccaagggaccaaggtggaaatcagacgtgagtagaccatatgttttgcctcttctattgtctgtgtcttcgagtccctgagtctccggactgatctgacttctgactctgcagtcagcctctgatctccttcagggaaaagatcatgatccgtcagttctcacactcgagaatagactgcgcattttctttggggaggaatcaacgttcagtcgttgggtgagaattccttgtctaagtcaagactccaggaacgtcctgcgaaacataacacattttggacagagccctggtcactggtcaggcaggccgtttttacttgggagggaagttaagaagagcccttgtgtgttcacctttggccagggggccaaagtggaaatcaaatgtgggccctctgtgcactggagcctcactgtcgtagctttgttcctctttgtgttcctttgtgtgggatttcagtaagtcngacgccaccgatgtaataaggttcatttncaggat

SEQ ID NO: 2189 - DNA, 569 bp, homo sapiens
aaagatgagctggaggaccgcaataggggtaggtcccctgtggaaaaagggtcagaggccaaaggatgggagggggtcaggctggaactgaggagcaggtgggggcacttctccctctaacactctcccctgttgaagctctttgtgacgggcgagctcaggccctgatgggtgacttcgcaggcgtagagtttgtgtttctcgtagtctgctttgctcagcgtcagggtgctgctgaggctgtaggtgctgtccttgctgtcctgctctgtgacactctcctgggagttacccgattggagggcgttatccaccttccactgtactttggcctctctgggatagaagttattcagcaggcacacaacagaggcagttccagatttcaactgctcatcagatggcgggaagatgaagacagatggtgcagccacagttcgtttaatctccagccgtgtcccttggccgatggtgatccacagtgttgacttaattactttcccctaaacaaaaatctcttttcgctgttaatatcactaacctgacccctgcagagaaaatcttgcaat

SEQ ID NO: 2190 - DNA, 548 bp, homo sapiens
  misc_feature (218)..(218): n=unknown
  misc_feature (413)..(413): n=unknown
cattgacaccatcagtagtaactactggagttggatccgcctatccaccggggggggactggagtggatcggccgcatttataggactggcaacagtaactttaatccctccctcgagaatcgtgtctccatgtccatagacacgtccaggcagaaatttttcctgaggctgaggtctctgaccgccgctgactcggccgtctatttctgtgcgaganattctccatgggggccgtggcttgattcctggggccagggaaccctggtcaccgtctcttcggcatccccgaccagccccaaggtcttcccgctgagcctctgcagcacccagccagatgggaacgtggtcatcgcctgcctggtccagggcttcttcccccaggagccactcagtgtgacctggagcgaaaggnacagggcgtgaccgccagaaacttcccacccagccaggatgcctccggggacctgtacaccacgagcagccagtgaccctgccggccacacagtgcctagccggcaagtccgtgacatgccacgtgaagcactac

SEQ ID NO: 2191 - DNA, 565 bp, homo sapiens
  misc_feature (299)..(299): n=unknown
tcagtagcaggtgccgtccacctccgccatgacaacagacacattgacatgggtgggtttacccgccaagcggtcgatggtcttctgtgtgaaggccagcggcagggcctcgtggcccaccatgcaggagaaggtgtcccccttcttccagtcctcggctgccacgcgcagtatgctggtcacagcgaaggtggtggtgccctggctgggctcctgccgggatgcccaagtcaggtacttctcgcggggcagctcctgtgacccctgcagccagcgaaccagcacgtccttggggctgnagccgcgtgccaggcacgtcagcgtcaccagctcgttcagggccagctcctccgacggcggcggcagcaggtggacctcgggccggaatgtgtttccggattttgagagggtggcggttagcggggtcttggactcggggtaggcagcagtgcaagtgaaggtcttcccatggttccatggctcggcacagcccggcaggacactggacacgctgtagcagccacagaggtcacgctcaggtggtcttgaacagcgctcttcccac

SEQ ID NO: 2192 - DNA, 435 bp, homo sapiens
  misc_feature (43)..(43): n=unknown
  misc_feature (131)..(131): n=unknown
  misc_feature (384)..(422): n=unknown
atgccctcggaagggtaaaaagatttttattcatatgcatganattattcagatagatggtcatatataccagtgccttgaatgcaagcaaaacttctgtgaaaacttagctcttattatgtgtgagagancccatactggggagaaaccttataaatgtgatatgtgtgagaaaacctttgtccaaagctcagatcttacttcacaccagaggatccacaattacgagaaaccttataaatgtagcaaatgtgagaagagcttttggcatcacttagcgctttcaggacatcagagaacacatgcaggtaaaaaattctatacatgtgacatttgtggcaagagttttggtcagagttctgatctgcttgtccaccagcgganncattactgggcgagaaaaccatatctatgtagtggantgtgacaaaatgc

SEQ ID NO: 2193 - DNA, 288 bp, homo sapiens
  misc_feature (17)..(282): n=unknown
ttaaaaagtaaaagtanancaatcattaagtagttcanatagaagaaaagnatcnntacctganttacccatcangtctacncngacccancctagnttctcccagacacaancttctgggtatctaaaaaactattttcatactgatttcatntaaagtcctctctaccatatgaggcaactaantatgannanagtcttctcatacatagtatatgnncatagantctnanccacaattaaatctctcantgnagaacaggctttttngggcctgatcanacagga

SEQ ID NO: 2194 - DNA, 225 bp, homo sapiens
  misc_feature (210)..(217): n=unknown
catcaccgacattgtgcaaggcagtggctttgagtggcagtgatgttgcacagatgagcaggccctggtcttgaaaaaagtgaccttcctagggagcagatgtcctagctattagagagctcagacagttgcttctcttctgaaatcctcctgtaaatctgaacattagcatcagggtctaagaggaggtaggagataggagagaacccnnngggtnagggcaga

SEQ ID NO: 2195 - DNA, 460 bp, homo sapiens
tgaaatgcacactttcattatgaattgtcttatgttatttcttcttcatattccagttagggcattatgctgatgtgtattcatctaatacgtgtaggaggtgatactatctatgattctaatttcgggcgaggaaaggagacattatgtaattgtttgttactaaaatgggccttggggatcacagggtcagggaccaccatgtgcatttgctcagcagagcagagctttctgcaaagagtctttcacagggccccatctcagcgagcaacagttcagagacccccttctcctggaatgcagaggcaatttttccttcatcttttctcactaaaatatctttctgaccctcctacggagacaaccgcttcttttgcacaataaaaccattgttgtctacctatcatcaaccatccactttcagagttcccctgccctgttgggctcaggcaaaaacttt

SEQ ID NO: 2196 - DNA, 466 bp, homo sapiens
  misc_feature (289)..(420): n=unknown
gacagagctggcctggagtccgcggctggccgcgtgagtaggtgattgtctgacaagcagaggcatgagctgggtccaggccaccctactggcccgaggcctctgtagggcctggggaggcacctgcggggccgccctcacaggaacctccatctctcaggttcctttgcccaaagactcaacaggtgcagcagatcccccccagccccacatcgtaggaatccagagtcccgatcagcaggccgccctggcccgccacaatccagcccggcctgtctttgttgagggncccttctccctgtggctccgcaacaagtgtgtgtattaccacatcctcanagctgacttgctgcccccggaagagagggaatggaagaaacgccggaggagtggaaactctactacccgatgcagtggganctggagtatgtgaaggagtggctggggacaacttacgagtttgaca

SEQ ID NO: 2197 - DNA, 516 bp, homo sapiens
  misc_feature (9)..(176): n=unknown
  misc_feature (278)..(479): n=unknown
ttggggttnngngntngttgnggtntgtnngtnngtgttnnatnntngatggnntttggtnntncntntgttttngnggngtgtgtgattnngcgntcacncnnntctanactaacagtgnccctgccctttttatttgaattcggagaaccnagaggcgnctgcagattctggangggtctcgcctgcccatcgctggcagcccgagatcctggggaggggatgccatactgctagagatgagggaagagagccccaagcaggaaaacattgatttnctgtacactcaaagggcatctcatgccttcagtccancgcctcctcgggccacagcccgtgccctcgcgccggctcagactagctctggncctgctgctgtcggtgcaggttgtcgtnttcttcctggtggtcctnnggcaggggcggntcctnnagncctgcagagnatgtctggagctcccgngtggacncggcgangnggaagaccacggggatctgggccagggttggggttgg

SEQ ID NO: 2198 - DNA, 567 bp, homo sapiens
  misc_feature (478)..(478): n=unknown
gccacctggagctacccggccagccgctcaacaactaccacatgaagacgctgctgctgtacgagtgcgagaaacacccacgagaaacggactgggacgagtcgtgcctgggcgaccggctcaacggcatcctgctgcagctcatctcctgcctgcagtgccgccgctgccctcactactttctgcccaacctcgacctctttcagggcaagccccattcggccctggagagcgctgccaagcagacctggaggttggccagggaaattctcaccaatcccaaaagcctggacaaactatagggtgctggggactgcttgaaaagcgacacaaacgggcgtgctctctcagacacacaactcagctataaacagcagaaactctggacacaaacttttatgtaagtcacctgaaataggaatccggcagaagaccttcattaattaagaagcaaacaaaaagagagcaacccaaccanaacaaatcacattcttgcacaaaagtgatcgttttcttccaaacaatgtgaatttaaaaggtcacacaaaagaagcaatcgggctccgc

SEQ ID NO: 2199 - DNA, 367 bp, homo sapiens
  misc_feature (281)..(281): n=unknown
agctcagggtgagggtagaggttcaggagagggaggagcacagtctgacattggcactgagaacgtttaacatcagtaaaacttttttttaaaagagaaattttacatatagttaaataattttttcacttggtgacaacattcaggcaaccaaaagcaaaacgaaatgggggggggatggggtggagagaaaaaggatagggggaaagaaggaaaaggggggggaactactatacattgatttgaaaatgtaccttgggtttcattttgtggtggcgganccgattgcttcttttgtgtgaccttttaaattcacattgtttggaagaaaacgatcacttttgtgcaagaatgtgatttgttttgg

SEQ ID NO: 2200 - DNA, 473 bp, homo sapiens
  misc_feature (339)..(374): n=unknown
ccttgggagaatcccctacatcacagctcctcaccatggactggacctggagcatccttttcttggtggcagcggcaacaggtgcccactcccaggttcagctggtgcagtctggagctgaggtgaagaagcctggggcctcagtgaaggtctcctgcaaggcttctggttacaccttcaccagctttggtatcagttgggtgcgacaggcccctggacaagggctggagtggatgggctggattaacacttacaatggtgacccagcctatgcacagaacgtccaggacagagtcaccatgaccacagacacatccacgaacacagcctactttgggnaagggggtttgggaaaagggggggggnaaaggggncccccttggaagaataccgaacggaacaccgggcaaatcctatttacttgtgcgaggatgaccagcagctggtacgatcttgccttctggggccaggga

SEQ ID NO: 2201 - DNA, 452 bp, homo sapiens
  misc_feature (289)..(289): n=unknown
  misc_feature (409)..(443): n=unknown
gtagcaggtgccgtccacctccgccatgacaacagacacattgacatgggtgggtttacccgccaagcggtcgatggtcttctgtgtgaaggccagcggcagggcctcgtggcccaccatgcaggagaaggtgtcccccttcttccagtcctcggctgccacgcgcagtatgctggtcacagcgaaggtggtggtgccctggctgggctcctgccgggatgcccaagtcaggtacttctcgcggggcagctcctgtgacccctgcagccagcgaaccagcacgtccttngggctgaagccgcgtgccaggcacgtcagcgtcaccagctcgttcagggccagctcctccgacggcggcggcaacaggtggacctcgggccggaatgtgtttccggattttgagagggtngcggttagcggggtcttggactcggggtaggcancagttcaag

SEQ ID NO: 2202 - DNA, 459 bp, homo sapiens
  misc_feature (336)..(446): n=unknown
cagcttcgagatcagtgcattgttgatgacatcacttacaatgtgaacgacacattccacaagcgtcatgaagaggggcacatgctgaactgtacatgcttcggtcagggtcggggcaggtggaagtgtgatcccgtcgaccaatgccaggattcagagactgggacgttttatcaaattggagattcatgggagtgtatgtgcatggtgtcagataccagtgctactgctatggccgtggcattggggagtggcattgccaacctttacagacctatccaagctcaagtggtcctgtcgaagtatttatcactgagactccgagtcagcccaactcccaccccatccagtggaatgcaccacagncatctcacatttccaagtacattctcaggtggngacctanaaattctgtaggccgttggnaggaactaccatancaggcnacttaaactccta

SEQ ID NO: 2203 - DNA, 489 bp, homo sapiens
  misc_feature (104)..(104): n=unknown
  misc_feature (365)..(482): n=unknown
caaactgcaacttatatctgcaatttattttggtatagacaagaggtatgccagtagcacactggtggcttcagaagaaattctcaacacctagctcgccaganagtctatgtatgggattgaacaatctgtaaactaaaggatcctaatcatgaaaataagtatgataaattataagtcactattggcactgttgtttatattagcctcctggatcatttttacagttttccagaactccacaaaggtttggtctgctctaaacttatccatctccctccattactggaacaactccacaaagtccttattccctaaaacaccactgatatcattaaagccactaacagagactgaactcagantaaaggaaatcatagngaaactagntcagcagatcccacccagacctttcacccacgtgaacancaccaccagngccacacatagcacagccaccatcctcaaccctcgggatacgnactgcag

SEQ ID NO: 2204 - DNA, 506 bp, homo sapiens
tcccattgataagaattaaatgttcaaaaagtttgtggattactagagaatgggcactgtctctaaatgaattcacagatcctttccccaaaggctcttactaaagacacccaaaattaatacactcacaagacttttctttggatcagtatataggccaaatcacaatatttgcacaggtagtctcaagaagtaattatttttacctttcaaagaggctcttttcttgtttgctaagataagaaactttcttgttcttagaatacatgtgagtgagtgcagcacagggcatgtgttgaggcctcacacagtagaagccttcttggtctctgttgtccaggtactggcacaattcagcatttgtgtttaggatcaggccacattcagagtggacttgggaagtgccattgacaaactggccagtgaagatcaccctgtcatagccttggttccttgcactccagagagctgacacccccttcactggggtggatgagcagcagaga

SEQ ID NO: 2205 - DNA, 447 bp, homo sapiens
  misc_feature (388)..(388): n=unknown
ctgggatctcagggcttcattttctgtcctccaccatcatggggtcaaccgccatcctcgccctcctcctggctgttctccaaggagtctgtgccgaggtgcagctggtgcagtctggagcagaggtgaaaaagcccggagagtctctgaagatctcctgtaagggttctggatacagctttaccaaccactgcatcgactgggtgcgccggatgcccgggaaaggcctggagtggctggggatctactggcctggtgactctgatatcagatgtaggccgtccttctaaggccaggtcaccatctcagccgacaagtccatcaccaccgccacctgcagtggagcagcctgaaggcctcggacaccgtcatgtattactgtgcggancgccccggcccacaacacagtggtggtagttgagacataaagtggggcgatacagttaa

SEQ ID NO: 2206 - DNA, 413 bp, homo sapiens
ccaccactgtgttgtgggccggggcggctccgcacagtaatacatgacggtgtccgaggccttcaggctgctccactgcaggtggcggtggtgatggacttgtcggctgagatggtgacctggccttagaaggacggcctacatctgatatcagagtcaccaggccagtagatccccagccactccaggcctttcccgggcatccggcgcacccagtcgatgcagtggttggtaaagctgtatccagaacccttacaggagatcttcagagactctccgggctttttcacctctgctccagactgcaccagctgcacctcggcacagactccttggagaacagccaggaggagggcgaggatggcgttgaccccatgatggtggaggacagaaaatgaagccctgagattcca

SEQ ID NO: 2207 - DNA, 420 bp, homo sapiens
  misc_feature (12)..(164): n=unknown
gctcagctcctngggctcctnctantctggctccgaggtgccagatgtgacatccagatgacccagtctccatcctccctgnctgnatctgnanganatagagtnaccatcgcttnccgggcaantcagagcattagcacctannctagttggcttcagcagnnaccagggaaagcccctaagctcttgatctttgctgcatccagtttgcaaagtggggtcccatcaaggttcagtggcagtggatctgggacagatttcactctcaccatcagcagtctgcaacctgaagattttgcaacttactactgtcaacagagttacaataccccgatcaccttcggccaagggacacgactggatcttaaacgaactgtggctgcaccatctgtcttcatcttcccggcatctgatgagcag

SEQ ID NO: 2208 - DNA, 532 bp, homo sapiens
  misc_feature (299)..(370): n=unknown
  misc_feature (522)..(522): n=unknown
aaagatgagctggaggaccgcaataggggtaggtcccctgtggaaaaagggtcagaggccaaaggatgggagggggtcaggctggaactgaggagcaggtgggggcacttctccctctaacactctcccctgttgaagctctttgtgacgggcgagctcaggccctgatgggtgacttcgcaggcgtagactttgtgtttctcgtagtctgctttgctcagcgtcagggtgctgctgaggctgtaggtgctgtccttgctgtcctgctctgtgacactctcctgggagttacccgattngagggcgttatccaccttccactgtactttggcctctctgggatagaagttattcagcaggcacacaacanaggcagttccagatttcaactgctcatcagatggcgggaagattaagacagatggtgcagccacagtttcgtttaagattcagtcgtgtccctttgccgaagtgatctgggtattgtaactctgttgacagtagtaagttgcaaatcttcangttgcagact

SEQ ID NO: 2209 - DNA, 437 bp, homo sapiens
  misc_feature (20)..(20): n=unknown
  misc_feature (272)..(283): n=unknown
ggacctgctcccctctcctnctcacccttctcattcactgcacagggtcctgggcccagtctgtgttgacgcagccgccctcagtgtctgcggccccaggacagaaggtcaccatttcctgctctggaagcaactccaacattgggaataattatgtatcctggtaccagcagctcccaggagcagcccccaaactcctcatttatgacaataataggcgaccctcagggattcctgaccgattctctggctccaagtctggcacgtcagcngccctgggcancaccggactccagactggggacgaggccgattattactgcggaacatgggatagaagactgagtgctggggtgttcggcggagggaccaagctgaccgtcctaggtcagcccaaggctgccccctcggtcactctgttcccggcctcctctgag

SEQ ID NO: 2210 - DNA, 602 bp, homo sapiens
  misc_feature (584)..(584): n=unknown
tgcagggagaagggcttgatgccttggggtgggaggagagacccctcccctgggatcctgcagctctagtctcccgtggtggggggtgagggttgagaacctatgaacattctgtaggggccactgtcttctccacggtgctcccttcatgcgtgacctggcagctgtagcttttgtgggacttccactgctcaggcgtcaggctcaggtagctgctggccgcgtacttgttgttgctttgtttggagggtgtggtggtctccactcccgccttgacggggctgctatctgccttccaggccactgtcacggctcccgggtagaagtcacttatgagacacaccagtgtggccttgttggcttgaagctcctcagaggagggcgggaacagagtgaccgagggggcagccttgggctgacctaggacggtcagcttggtccctccgccgaacaccccagcactcagtcttctatcccatgttccgcagtaataatcggcctcgtccccagtctggagtccggtgatgcccagggcggctgaacgtgccagacttggagccagaaaatcgtcaggaatccctganggtcgctattattgtcat

SEQ ID NO: 2211 - DNA, 290 bp, homo sapiens
  misc_feature (2)..(280): n=unknown
cnacatctgtcctcctananaatctnntgnnancncggntcntcannatgggactggacctggaggatcctcttcttggnggcagcagccacaggagcccactcccaggtgcagctggtgcagtctggggctgaggtnaagaagactggggcctcagtgaaggtntcatgtaagacttctggatatganttcatcgcctactatatgcactgggtgcgacangnccctggacaagggcttgagtggatgggacggatcaaccctaacactggtgacananactatgcaca

SEQ ID NO: 2212 - DNA, 411 bp, homo sapiens
  misc_feature (398)..(411): n=unknown
aggcgggcggctcagtagcaggtgccgtccacctccgccatgacaacagacacattgacatgggtgggtttacccgccaagcggtcgatggtcttctgtgtgaaggccagcggcagggcctcgtggcccaccatgcaggagaaggtgtcccccttcttccagtcctcggctgccacgcgcagtatgctggtcacagcgaaggtggtggtgccctggctgggctcctgccgggatgcccaagtcaggtacttctcgcggggcagctcctgtgacccctgcagccagcgaaccagcacgtccttggggctgaagccgcgtgccaggcacgtcagcgtcaccagctcgttcagggccagctcctccgacggcggcggcaacaggtggacctcggggccggnatgtgtttccggn

SEQ ID NO: 2213 - DNA, 453 bp, homo sapiens
  misc_feature (45)..(120): n=unknown
  misc_feature (396)..(396): n=unknown
gtccgtgcgcaccgcccggcgtccagatttggcaattcttcgctnaaagtcatcatgagctttttccaactcctgatnaaaaggaaggaactcattcccttggtggtgttcatgactgtngcggcgggtggagcctcatctttcgctgtgtattctctttggaaaaccgatgtgatccttgatcgaaaaaaaaatccagaaccttgggaaactgtggaccctactgtacctcaaaagcttataacaatcaaccaacaatggaaacccattgaagagttgcaaaatgtccaaagggtgaccaaatgacgagccctcgcctctttcttctgaagagtactctataaatctagtggaaacatttctgcacaaactagattctggacaccagtgtgcggnaatgttctgctacatttttagggttgctacatttttgggctctggataaggaattaa

SEQ ID NO: 2214 - DNA, 540 bp, homo sapiens
  misc_feature (519)..(519): n=unknown
gaggagccccagccctgagattcccaggtgtttccattcagtgatcagcactgaacacagaggactcaccatggagttgggactgagctggattttccttttggctattttaaaaggtgtccagtgtgaagtacaattggtggagtctgggggaggcttggtacagcctggcgggtccctgagactctcctgtacagcctctggattcatgtttgatgattatgccatgcattgggtccggcaagctccagggaagggcctggagtgggtctcaagtcttccttcgaatagcggtacataggctacgcggactctgtgaaaggccgattcaccatctccagagacaacgccaagaactccctgtttctggaaatgaacagtctgagagtggacgacacggccttgtattactgcacaaaaggaggggggccttatagcagctcctctgggtactaccttgactactggggccagggagtcctggtcaacgtctcctcagcatccccgaccagccccaangtcttcccgctgagctctgca

SEQ ID NO: 2215 - DNA, 269 bp, homo sapiens
  misc_feature (236)..(236): n=unknown
ggtggggacaggcgggcggctcagtagcaggtgccgtccacctccgccatgacaacagacacattgacatgggtgggtttacccgccaagcggtcgatggtcttctgtgtgaaggccagcggcagggcctcgtggcccaccatgcaggagaaggtgtcccccttcttccagtcctcggctgccacgcgcagtatgctggtcacagcgaaggtggtggtgccctggctgggctcctnccgggatgcccaagtcaagtacttcttcgcggg

SEQ ID NO: 2216 - DNA, 543 bp, homo sapiens
gccccagccccagaattcccaggagtttccattcggtgatcagcactgaacacagaggactcaccatggagtttgggctgagctgggttttccttgttgctattataaaaggtgtccagtgtcaggtgcaactagtggagtctgggggaggcttggtcaagcctggagggtccctgagactctcctgtgcagcctctggattcacattcagtgactccttcatgagttggatccgccaggctccaggaaaggggccgcagtggcttgcatacattagtagcgatagtaccatcatatactacgcagactctgtgaagggccgattcaccatctccagggacaacgccgacaactcactgtacctgcaaatgaacagcctgagagtcgaagacacggccgtgtatttctgtgcgagtcacgaaccaattggaacgacggctgcttttaatatctggggccaagggacaatggtcaccgtctcttcagcatccccgaccagccccaaggtcttccgctgagctcgacagcaccccccaagatggg

SEQ ID NO: 2217 - DNA, 374 bp, homo sapiens
tggggacaggcgggcggctcagtagcaggtgccgtccacctccgccatgacaacagacacattgacatgggtgggtttacccgccaagcggtcgatggtcttctgtgtgaaggccagcggcagggcctcgtggcccaccatgcaggagaaggtgtcccccttcttccagtcctcggctgccacgcgcagtatgctggtcacagcgaaggtggtggtgccctggctgggctcctgccgggatgcccaagtcaggtacttctcgcggggcagctcctgtgacccctgcagccagcgaaccagcacatccttggggctgaagccacgtgccaggcacgtcagcgtcaccagctcgttcagggccagctcctccgacg

SEQ ID NO: 2218 - DNA, 573 bp, homo sapiens
  misc_feature (24)..(177): n=unknown
aggatccgcggaaaaccacgagcnggctcncagggaagccaaggagaccctgcagaagcngcccgangagatccaaagagacatcctactggagaagaagaaggtggcccaggaccagctgcgtgacanggcgccgttcagaggcctgcccccggtggacttcgtgcccccaatcgnggtggagagccgggagcccgccgacgccgccatccgcgagaaaagggcaaagatcaaagagatgatgaaacatgcttggaataattataaaggttatgcctggggattaaatgaactcaaacctatatcaaaaggaggccattcaagcagtttgtttggtaacatcaaaggagcaactatagtagatgccctggatacactttttattatggaaatgaaacatgaatttgaagaagcaaaatcatgggttgaagaaaatttagattttaatgtgaatgctgaaatttctgtctttgaagtaaatatacgctttgttggtggactactctcagcctactatctgtctggagaagagatttttcgaaagaaagcagtggaacttggggtaaaattgct

SEQ ID NO: 2219 - DNA, 315 bp, homo sapiens
  misc_feature (28)..(263): n=unknown
ttcctttttatctttagggaggataggnagaagatgtgcctcgctattnaagatccaatgctccagtggaagaagatcgtcgctcagannatattaggtacnnatatttcaatgtctctgnnacnnaganactcngctgnacatcatcatnactctcatnnaganggnnnacatcccttnggcctgaatancctccattcactctgcaatggntttccaaggcctctacggcttcccaggcccatttcctgtactttggntcntgagtcagtctccacatatacatgtaagtctccataacttctggccgtaaga

SEQ ID NO: 2220 - DNA, 276 bp, homo sapiens
  misc_feature (64)..(182): n=unknown
caaccaggacacagcatggacatgagggtccctgctcagctcctggggctcctgctgctctggntctcaggtgccagatgtgacatccagatgacccagtntccatcctccctgtntgcatctntaggagacagagtcaccatcacttgccaggcgagtcaggacattagcaactatttaanttggtatcagcagaaaccagggaaagcccctaagctcctgatctacgatgcatccaatttggaaacaggggtcccatcaaggttcagtggaagt

SEQ ID NO: 2221 - DNA, 228 bp, homo sapiens
atggacatgagggtccccgctcagctcctggggctcctgctgctctggctcccaggtgccaaatgtgacatccagatgacccagtctccttccaccctgtctgcatctgtaggagacagagtcaccatcacttgccgggccagtcagagtattagtagctggttggcctggtatcagcagaaaccagggaaagcccctaagctcctgatctataaggcgtctagttta

SEQ ID NO: 2222 - DNA, 317 bp, homo sapiens
  misc_feature (154)..(247): n=unknown
tgataatatgtcctcattgagcaagtgacaataggaaacccccagaaattgtgtgcactgttttgcctgatctcacacactttggacagagactttgatcacattcttaggggcccacaaatggtcaaaaacctctgaactgagacagcagcannnnnnnnnnnnnnnnnnnnnnnnnnnnnnnnnnnnnnnnnnnnnnnnnnnnnnnnnnnnnnnnnnnnnnnnnnnnnnnnnnnnnnnnnnnnnnccattaatgggtaaagtatttagggatttcccagaggccttagggaccccttaaaaaatggggttaccca

SEQ ID NO: 2223 - DNA, 409 bp, homo sapiens
gtttgaaatagctcattaaacagttccacaaatagtatcacaacatgcataaacaatgctcttgataccacttcaaacatttttaagacaggttatgaattagccttgttttgaactagtgttatagatggctagggagttaccaaatatttagactactgaaaaggctaaatggatattaattgtagtaatttgattattaatctttataagtaaataagaacctctactaaaagatgtgtttccaagggtttttaacaaataggttgtctacggccataccaccctgaacgcgcccgatctcgtctgatctcggaaacaaataggtttacatgagagcatataaacctataaaagttgaatcaattggctaaccacatttttgaagaggtccataaggcatctgaga

SEQ ID NO: 2224 - DNA, 402 bp, homo sapiens
attcttcccacccccagtgaagcagaagaagtggcagggcctgcaggagatgaggctgccgagccctgagcttgagctgagcaagcttcgaacctctgccatcaggacagcccccaatccctattattgccaggtggggcttggcccggcccagtcctggcctctgccaccaggtgtcaccgaggtttccccagccaatgttactctgctcagagccctgggccatggtgcctttggggaggtgtatgagggactggtaattggccttcctggggactccagtcccctgcaggtagctatcaagaccctgccagaactctgctcgcctcaggatgagctggatttcctcatggaggccctcatcatcagcaagtttcgccatcagaacattgtgcggtgtgt

SEQ ID NO: 2225 - DNA, 528 bp, homo sapiens
  misc_feature (80)..(80): n=unknown
  misc_feature (456)..(508): n=unknown
ggggtctgcccagatgaaggatgctcataatgggagagcaatccagtgctccccatggacacctggggtgtgtgtaaggnggcctctggccccaagatcaaaagctggaagtggctgggcccttccctgggaggcctgggctggtttccagcatggcaagtgcagcgctgccaggccagccccgagacaggcccagacacacagcacagactgcagggaacagaggccgctggcataacaggccacccaggagcctgaggagtatagggagggaccctcagtgcctcagtccttaccctcagggccccttggggctcaggagcgataagtgggattccaaaggttctgaggttggaggcccctggatttgaggggcttgaggccagaggacagccaggggccaagagggctacctccccagcttttcaacttctctggactcagttctggggtgtnggggtcttagggactccaaagatctgttccccagcccagaagtccttcctcntctgggttggcccagctcat

SEQ ID NO: 2226 - DNA, 291 bp, homo sapiens
  misc_feature (46)..(46): n=unknown
atttgacctttcctacacaactcagagcttctcttttcagttagtngtttatacagacaccaagtatgagtcttgcatttaaaacttcatagtacaaaaaactccacccacattgcacagtgcttttccaaatcaatagctttgtggccatgataaggttggtaccacttcactccgtgtcctcagtgaggaaactgaggcacagaatggcaagtgactgagcatcagcacaatgagtcagtgccttattcctgctctgtctcactttaagacatcaagttgctcatctga

SEQ ID NO: 2227 - DNA, 509 bp, homo sapiens
cccctgcagcaggggaggggagggcgtggggaggtgggcgcccctcccaccagcctgagaccgctctctgcctctctcctctcctctcttctccagcatctcacccactttctctccttctcaatctcctgctcccacctccagcaccttcggggattccctcttgtagcccctgctttctaagtccaccctgggctggggaaaggaaagtaagagaccacggggacaatttcaagccccccagtctccacaggggctagtccccctggctacctgcctggctttctctctcctgggctaggggctggggaggtctgcggggctcagtcctggccctgcagtatcccaacaccctgctctggggctgtctccagagccaaaggctagtgcctgaggtcacagaggtgggagggacagggccaccgctcccgcctgggctccatccagcacaagaagccaggctcactcactggccaaacagccaagggctcacagcttggggtccgcag

SEQ ID NO: 2228 - DNA, 466 bp, homo sapiens
acctcagaagttattatgccagctggtaccagcagaagccaggacaggcccctgttcttgtcatgtatggtaaaaacaaccggccctcagggatcccagaccgattctctggctccttctcgggaaacacagcttccctgaccatcactggggctcaggcggacgatgaggctgactactattgtaactcccgggacagcagtggtaaccgtctcggtgtggtcttcggcggagggaccaagctgaccgtcctaggtcagcccaaggctgccccctcggtcactctgttcccgccctcctctgaggagcttcaagccaacaaggccacactggtgtgtctcataagtgacttctacccgggagccgtgacagtggctggaaggcagatagcagccccgtcaaggcgggagtggagaccacacacccttccaaaacaaagcaacaacaagtacgcggcaagcagcta

SEQ ID NO: 2229 - DNA, 405 bp, homo sapiens
gcagggagaagggcttgatgccttggggtgggaggagagacccctcccctgggatcctgcagctctagtctcccgtggtggggggtgagggttgagaacctatgaacattctgtaggggccactgtcttctccacggtgctcccttcatgcgtgacctggcagctgtagcttctgtgggacttccactgctcaggcgtcaggctcagatagctgctggccgcgtacttgttgttgctttgtttggagggtgtggtggtctccactcccgccttgacggggctgctatctgccttccaggccactgtcacggctcccgggtagaagtcacttatgagacacaccagtgtggccttgttggcttgaagctcctcagaggagggcgggaacagagtgaccgagggggc

SEQ ID NO: 2230 - DNA, 365 bp, homo sapiens
  misc_feature (219)..(313): n=unknown
ggacgtctccaccatggcctgggctctgctgctcctcaccctcctcactcaggacacagggtcctgggcccagtctgccctgactcagcctgcctccgtgtctgggtctcctggacagtcgatcaccatctcctgcactggaaccagcagtgatgttgggagttttgactttgtctcgtggtatcaacaacacccaggcaaagcccccaaagtcatganttatgaggtcactaagcggccctcaggggttcctaatcgcttctctgcctccaagtctggcagcacggcctccctgacaatctctgggctccangctgaggatgaggcttattattactgtcctcatttgtacgtagtagcacttc

SEQ ID NO: 2231 - DNA, 470 bp, homo sapiens
gaagggcttgatgccttggggtgggaggagagacccctcccctgggatcctgcagctctagtctcccgtggtggggggtgagggttgagaacctatgaacattctgtaggggccactgtcttctccacggtgctcccttcatgcgtgacctggcagctgtagcttctgtgggacttccactgctcaggcgtcaggctcagatagctgctggccgcgtacttgttgttgctttgtttggagggtgtggtggtctccactcccgccttgacggggctgctatctgccttccaggccactgtcacggctcccgggtagaagtcacttatgagacacaccagtgtggccttgttggcttgaagctcctcagaggagggcgggaacagagtgaccgagggggcagccttgggctgacctaggacggtcacttggtccctccgccgaataacacagaagtgctactaacgtacaaa

SEQ ID NO: 2232 - DNA, 397 bp, homo sapiens
  misc_feature (145)..(145): n=unknown
gccaacctgttccttggaccctcacgtcacccctgtctaatcccttatcccaggagtgctatgttactcagcctgggacctcacacacatctggggtcccacattccacagaggggaagcagcaggcttctccctgctcttcccntccccacaaccctgaacccctgcctctcctctgacagggcctctcatcatgcctatgcccacttcacctctgactcctgccttggttacaggaggtggaggccggaaaggtcgcaccaagagagaagtgctgccaacaccaaccgccccagccctggcgggcacgagaggaaatggtgaccaagctgcagaattcagagaggaagaagcgaggggcacggcgctgagacagagtggaggtaaggagtcgggg

SEQ ID NO: 2233 - DNA, 387 bp, homo sapiens
aggagccccagtttcttctgtagctttcttttctgggggatcttcctggctctgcccctccattcccagcctctcactccccatcttgcacttttgctagggttggaggcgctttcctggtagcccctcagagactcagtcagcgggaataagtcctaggggtggggggtgtggcaagccggcctggatcctgtcctgggtcctccttcctccgcagtcccgtctctattgctgggtgtagtgtccatggtctggcctcatctggggggtgaggaaaagcaggtggtaaaagggacagagatctgggttctaattctgcctctcccactcacttgatttgtgactccagggaaggacccaacctctctatctcaatttctgtctctg

SEQ ID NO: 2234 - DNA, 370 bp, homo sapiens
  misc_feature (94)..(94): n=unknown
  misc_feature (266)..(341): n=unknown
ggcgttaccatcgtccgtgcgcaccgcccggcgtccaggtgagtctcccgtctgcagagacgcggacgcgccggcccgcagttggcctgcggangcggtggacggtttggcgcccaccaggcgatcaatactttggatttttaatttctagatttggcaattcttcgctgaagtcatcatgagctttttccaactcctgatgaaaaggaaggaactcattcccttggtggtgttcatgactgtggcggcgggtggagcctcatctntcgctgtgtattctctttggaaaaccgangtgatccttgatcganaaaaaaatccagaaccttgggaaactgtgngacctactgtacctcaaaagcttataacc

SEQ ID NO: 2235 - DNA, 515 bp, homo sapiens
  misc_feature (158)..(158): n=unknown
  misc_feature (282)..(491): n=unknown
aaaatgtagacaaaccctaaaaatgtagcagaagcatttccgcacactggtgtccagaatctagtttgtgcagaaatgtttccactagatttatagagtactcttcagaagaaagaggcgagggctcgtcatttggtcaccctttggacattttgcanctcttcaatgggtttccattgttggttgattgttataagcttttgaggtacagtagggtccacagtttcccaaggttctggatttttttttcgatcaaggatcacatcggttttccaaagagantacacagcgaaagatgnggctccacccgccgccacagtcatgaacaccaccaagggaatgagttccttccttttcatcaggagttggaaanagctcatgatgacttcagcgaagaattgccaaatctagaaattaanaatccaaagtattgatcgcctggtgggcgccaaaccgtccaccgcgctccgcaggccaactgcgggccggcncgtccgcgtcttctgcagatggga

SEQ ID NO: 2236 - DNA, 553 bp, homo sapiens
  misc_feature (240)..(364): n=unknown
gtggcgcggtaaggccccagctacgcaacgcataacctggtcctgcttggacctgtgcatatgtaaactcatctctaacacagagcttggggggctgatgtgtgggtcccagcctagaagaaacccacaggtgtcttccttggctcccgaaaagatcattcaatccatcttagttagaccctgggtgactgtgttgcagatcagaaggagaattacagttcttatttgggatctgctttnnnnnnnnnnnnnnnnnnnnnnnnnnnnnnnnnnnnnnnnnnnnnnnnnnnnnataaaattgagggtttgaaccaggtcccccgatttaaagctctcttgccaagacttttcaaccttacctgcnagaatccccattctagaaagggagctttttcagagagcatggagaccccaagtttatgtgaacaaaagtgattcctttagtcgtcttcccaccaacaaagaaatgcccgtggtgctccctttgtaaattccaccagtctcagctgtgggtgattccacttgtaagctgagatttgtatgcggatgaggc

SEQ ID NO: 2237 - DNA, 492 bp, homo sapiens
  misc_feature (323)..(323): n=unknown
  misc_feature (459)..(459): n=unknown
aagagttcttaacaggttccactggtatccaggcaagctaccctccagactcaaggtgtgaggcttacatagctgctcctcctcgctgaaacccatgattgccatggcctccacggtttcctggaacatctcatcatcctgggctgctgggatgggcacaaagccattggagaggaaggtgtagttgttgaagccctccaaaagcaagtcacttctcatcttctccttggctccagcaatcatgtagtaaaagatgtggaatgtcctctcgtctctggcttggcgaattgcccgtgatttttctagcagataggtctcaatgntggctcccacgatgtaacccgtgacgtcgaagttgatgcggatgaatttgccgaatcgtgaggagttgtcgttcttcactgttttggcgttgccgaaagcctccagaatcgggtttgcttgtagaagctgcttttncagtcttcctaaaattcattcacatctagttat

SEQ ID NO: 2238 - DNA, 519 bp, homo sapiens
  misc_feature (506)..(506): n=unknown
gttattactttgtttcatggccacaagtagctattaatatctcacaaaagtatcctaagagcctcagtagggaaatggtaagcatgggtggccctgcacacatatctctctgcttggagaagcaactcagagaacattccatgctcacgttaatctcatcttcagagagaacagagcagattataaattgtaacatccaaaagccaaacttccagtattcagcaaagacagggacctctaaatggcacagtcaacacaaaaatcccacactatgtgtgccactgcactacactctatgtgacaggaaaataaaagcaacctcaggccttcaaccagataacgaagcattgaagatgagctgacagcccagaggagaggtagctgatgggaagaggagaaactgggatgttatctagaatcctgacactaggaggtcagtcagggaggggtagggaacctgcaggcatctggcatttagcctcactgtacaatcctcattttatttntttttgagacagg

SEQ ID NO: 2239 - DNA, 156 bp, homo sapiens
  misc_feature (132)..(132): n=unknown
agtacagtgactgacacatcctaaatcctcaatatgccagccagccattattattgttagaagaacaggctccctgcattgtgggcttttctgagtgtgtacactccctccttgtgtttctgatcgcaaatnaatatttattaccaatgatttatt

SEQ ID NO: 2240 - DNA, 334 bp, homo sapiens
  misc_feature (267)..(267): n=unknown
tttaaaaaaaatccatcttagtatcttgacccccacccttcacccactcacagagaagcccacatgaggaaacaggttatgtcttggacatctctgtccccctcagtgtctggtatagtgactgacacacagcatgttctcaagaaatgtttgaatcacagtacattgaatcagtaacagtctgactgacccccaggcagaaaatgcagaggcattttttctctctattccagatttcagctgtagctcttgtaattctcatattgnttttcaatcaccagaattgatttccctcatccctcttcccagggtcatctccagtgaactgtattaa

SEQ ID NO: 2241 - DNA, 354 bp, homo sapiens
  misc_feature (4)..(339): n=unknown
cctncngnctanaaaattttacatcnngnnncnanntngttgtcntgnatcttaacacagcatctagaatataatgggtgtgaaaatatctggtccacttccatgacaccangatgctagctaggtagcagtgagaacacaatnaaacaacaaaaagagcagaaanaantgccacanggtgagagcacagagacttgtttatgaattccaattttaaaagggcttatagaaattcattgctanaacttcanccatgcaaagccanttatgctggaaataatcctagtggtcacacgttcttcctgtgccatgcagtagcatctccnngnagctcatctnaacagaagccagctt

SEQ ID NO: 2242 - DNA, 381 bp, homo sapiens
tttttttttatgaaaggataaaaacacgccctctattggggtcaggttttgtgctggtatttctcccacctactgtatcataggagcttagattcccagctgcttgctctcagctgcagttctctgatggcttgcacagggtggaccagcccccttcctctatgtgtgtgtctgctgctgacctgtggctttgccgaggcagggaagctactggtagtgcccatggatgggagccactggttcaccatgaggtcggtggtggagaaactcattctcagggggcatgaggtggttgtagtcatgccagaggtgagttggcaactgggaagatcactgaattgcacagtgaagacttattccaacttcatataccctggagga

SEQ ID NO: 2243 - DNA, 629 bp, homo sapiens
ggaaacatcagaaaaaaagtaaacttgcccagcacttcatagctgtattttgggtttttatcaaattcagctccatttgacataagcaatgattatcttctcaaatacaccacccaccaatttcatagcatcattctttttccccaaagcaagaaatcatatgctgttctcagtgcactccaagccattcattcatttcacctacactctaaaggtacaaagcttcccttctttaaacacacaaggtggcacctatgaagcaggacagagatgaggactgaccattattggttaaggatcaattgcaaccatctgcagaagccaaaagataagattaaaactgccatttgcagtaggggcagcggtgggaccacctttgaatcccgcactcccaaacaggccatgtttcagagtaagaaaagtaatctagaatgccagcctgtctgcacgtcctctgaaaaatggcacatgtcatcctgatcaaagacaccggaggggcacgatacatattcaaatatctttactgactagcgagtctattatttttatttaagagaattttttaaagcactctggggctgattaatttatgcaaagtatttccttaataagataaaatgaatttaaca

SEQ ID NO: 2244 - DNA, 448 bp, homo sapiens
  misc_feature (437)..(437): n=unknown
agggaatggggtatcaagtagagggagacaaaagatggaagccagcctggctgtgcaggaacctggcaatgagatggctttagctgagacaagcaggtctggtgggctgaccatttctggccatgacaactccatccagctttcagaaatggactcagatgggcaaaactgacctaagctgacctagactaaacaaggctgaactgggctgaggtgagctgaactgggctgagttgaactgggttgagctgagctgagctgagctggcacgtgcactgctgcccaccccgagttgaagaccccactaaccgccaacatcacaaaatccggtgggtccagaccctgctcggggccctgctcagtgctctggtttgcaaagcatattcccggcctgcctcctccctcccaatcctgggctccagtgctcatgccaagtncagagggaaac

SEQ ID NO: 2245 - DNA, 407 bp, homo sapiens
  misc_feature (394)..(394): n=unknown
ggctcagtagcaggtgccgtccacctccgccatgacaacagacacattgacatgggtgggtttacccgccaagcggtcgatggtcttctgtgtgaaggccagcggcagggcctcgtggcccaccatgcaggagaaggtgtcccccttcttccagtcctcggctgccacgcgcagtatgctggtcacagcgaaggtggtggtgccctggctgggctcctgccgggatgcccaagtcaggtacttctcgcggggcagctcctgtgacccctgcagccagcgaaccagcacatccttggggctgaagccgcgtgccaggcacgtcagcgtcaccagctcgttcagggccagctcctccgacggcggcggcaacaggtggacctcgggccggaatgtntttcctggagggt

SEQ ID NO: 2246 - DNA, 545 bp, homo sapiens
  misc_feature (148)..(176): n=unknown
gggcaaaggactgttggccttaaccagagagatttgagggagagatgaggctgagagccaggggatcctgccatgtcccagcataaaaacagtacctgacacagatgggtgcttgggagctgttgtcggatgaatgagtggacagatnnnnnnnnnnnnnnnnnnnnnnnnnnnnnatagattgatggacaaacagatgaacagatgaatagctggatggacaactggatggatgggtagacagaatgatctcagagatcagaaaaagcttcatgcactaagtgggactgaaccgcgtctccatgggtagaaagcagaggaatctccacttgagtcaggaatgacccagtgctctcaatccagggagaaagccagcctggcttcactggggacacttgtgtgggggactcagaggccctttaaatgaggccagacgaggttggacaggtccaagccaactcagcactcctctgccacactgcacaggaggggatgtgtcactcagggagttgctgggacctatgggcccagtgttgtcatcagca

SEQ ID NO: 2247 - DNA, 528 bp, homo sapiens
  misc_feature (402)..(493): n=unknown
gagaagggctggatgacttgggatggggagagagacccctcccctgggatcctgcagctccaggctcccgtgggtggggttagagttgggaacctatgaacattctgtaggggccactgtcttctccacggtgctcccttcatgcgtgacctggcagctgtagcttctgtgggacttccactgctcgggcgtcaggctcaggtagctgctggccgcgtacttgttgttgctctgtttggagggtttggtggtctccactcccgccttgacggggctgccatctgccttccaggccactgtcacagctcccgggtagaagtcactgatcagacacactagtgtggccttgttggcttggagctcctcagaggagggcgggaacagagtgacagtggggttggncttgggctgacctgtgtggacagggaanggggttaaagaagggagacagaataaccggggtgtttgtggagccccctctctctgtctaaangtctctgggaaggggttcacagtgtggccatccgg

SEQ ID NO: 2248 - DNA, 339 bp, homo sapiens
  misc_feature (98)..(98): n=unknown
gggccagcctccagcgctgctctttctgtaggttatttattagtattggatgaaggcgaaggctgggagtgtctttcccaccagcccttgcccatggnggggaggacatctggtctgagtcagagatctgtgcacactttctaaacagcttgtgatgcaagtgtgagcctattgtgttacttgaccttattttggaagttttgaattggcctaggaggaaacccagaaatgaaccaggggtatgtcatcacttttttcatatcaagtcctcaacctccttccacataatgctctatcctctaagggtggaactctgaagttggagaaggtggaataaag

SEQ ID NO: 2249 - DNA, 87 bp, homo sapiens
aaaagaaaaagagaaagaaaaaaatgaagtattttagcataggccatccatcacaggggtttaggattgtttctcctctctggttga

SEQ ID NO: 2250 - DNA, 403 bp, homo sapiens
  misc_feature (383)..(397): n=unknown
gcaaactgccctcttttgtcagccctgagctttcctgggctggacctcagagggggctgggtggtcccagggcgcgaccttgggctgccagaagccacgctagggttggtcaaggctctcagtgcaaggtttcgacatagtcgttctgtgctgcgttctgcagttgtcagctgtcacctgcaaacctcagcagctccccttagggcgtggtgggcaaacagtgtcagtgatgcgtgtccacagcctcgggaaacacttcaggtccacgttttcgtatgttgtcactagatctcggcccttccgaccgaaagcttcggcactcacgcggtgggtccccatgcttgtcctgttaaatactcttgaactctaatctgtcctgatantgaataatgcaagnatgggt

SEQ ID NO: 2251 - DNA, 343 bp, homo sapiens
  misc_feature (264)..(326): n=unknown
gtgaagttttaataatgttgacgagaaagaaacggcttgaattttatacattgtcagcttgcaagtcttcatgggggtttttcattctttttaggagcacaagtaatgtagccacagtcactgcagaaagaatgtctttgagagggacattcttgtcatttttattagttgttcaacattgccacagaagtttgattttctgtcagccagtacatagctgccatttattcattgcctgtcagtaaatagtgattgaaaattccnatgaacncagggttnggaatagcagaaaccaaaacnngcncngggcgnaaagagcntnnnancaagcagggcagcaaac

SEQ ID NO: 2252 - DNA, 462 bp, homo sapiens
  misc_feature (47)..(53): n=unknown
  misc_feature (187)..(237): n=unknown
  misc_feature (341)..(361): n=unknown
cgattctccgtctccagagacaattccaagaataccctctatttgcnactnancagcctaacagtcgacgacacggctgtttattactgtgcgaggggcaccaggtctcggggtggttatctcgcttggggcccgaaacaggagaggcccgaatacttctaccacatggacgtctggggcaaagggnccngggnnatcntctcancantnncccaganaanccaaaggntttnccnnctgaggcctctgcagcacccagccagatgggaacgtggtcatcgcctgcctggtccagggcttcttcccccaggagccactcagtgtgacctggagcgaaacgnacagggcgtgaccgccaganacttcccacccagccaggatgcctccggggaactgtacaccacgagcagccagctgaccctgccggccacacagtgcctagccggcaagtccgtgacatgc

SEQ ID NO: 2253 - DNA, 580 bp, homo sapiens
aggcgggcggctcagtagcaggtgccgtccacctccgccatgacaacagacacattgacatgggtgggtttacccgccaagcggtcgatggtcttctgtgtgaaggccagcggcagggcctcgtggcccaccatgcaggagaaggtgtcccccttcttccagtcctcggctgccacgcgcagtatgctggtcacagcgaaggtggtggtgccctggctgggctcctgccgggatgcccaagtcaggtacttctcgcggggcagctcctgacccctgcagccagcgaaccagcacgtccttggggctgaagccgcgtgccaggcacgtcagcgtcaccagctcgttcagggccagctcctccgacggcggcggcagcaggtggacctcgggccggaatgtgtttccggattttgagagggtggcggttagcggggtcttggactcggggtaggcagcagtgcaagtgaaggtcttcccatggttccatggctcggcacagcccggcaggacactggacacgctgtagcagccacagaggtcacgctcaggtggtccttgaacagcgctcttcccacttgag

SEQ ID NO: 2254 - DNA, 433 bp, homo sapiens
  misc_feature (43)..(168): n=unknown
  misc_feature (335)..(359): n=unknown
ggcttttcagcttgtgggctgaacagaaatttatgtgaagganggtttggtagctgggggaagatgcagattatttgtggcaggtgagatgagggcagtggcgttantgagtgtctctctccttctccttcattttttcacactttcccagactgcgtttcagttgangatgggtgctggtccatgggaaaggagtcttacagcagcttctcattctggacactgcagtcatttttgaactccaggaaggaagcaaacctgcagtcatagtggatgagattttaatatggaaaaaccgtattaattctcataggagttgcaatactagtatgganaaacgagcagaccttggtggctgnctgtgaagggaaatttgactgacgtggcgatgatgatatagttggtagatacaggaaagtgaaggtggaatggg

SEQ ID NO: 2255 - DNA, 150 bp, homo sapiens
  misc_feature (2)..(150): n=unknown
cnaanngnaagtgagttgaaatgntaactgncataaatngtaatcatncccnaaaggtnagaagntaggaatgcgacactaacagtaaatcangctgctgactnatacccaaatcggactacaacaggactgatnatnaanaaatccann

SEQ ID NO: 2256 - DNA, 357 bp, homo sapiens
ctcagttcatcttctcaccatgaggctccctgctcagctcctggggctgctaatgctctggatccctgtttccgtatccagtgcggacattgtgatgacccagactcctctctctctgtccgtcacccctggacagccggcctccctctcctgaactgtggctgcaccatctgtcttcatcttcccgccatctgatgagcagttgaaatctggaactgcctctgttgtgtgcctgctgaataacttctatcccagagaggccaaagtacagtggaaggtggataacgccctccaatcgggtaactcccaggagagtgtcacagagcaggacagcaaggacagcacctacagcctcag

SEQ ID NO: 2257 - DNA, 272 bp, homo sapiens
  misc_feature (251)..(251): n=unknown
aggatttatggggttatgtgatatcaagggctaacataaaggtaattggctatttaaccaatggttctcagttggcgtaaggtccctctaagattctagaattaactacattttaaaatataaagtccttgaagattttctaggaccctgggatcagtaacatttaacaaaagtcctctttctctagaatctctcggggtgggttaaatgtcatttcatatcagcaggaaagagaacccatttattttgcnaagtgattagactatgctcaa

SEQ ID NO: 2258 - DNA, 354 bp, homo sapiens
  misc_feature (278)..(345): n=unknown
ggcggctgctgccaaccagcccctgattgtggaggatctgttgaacctgggagcagaacccaatgccgctgaccatcagggacgttcggtcttgcacgtggccgctacctacgggctcccaggagttctcttggctgtgcttaactctggggtccaggttgacctggaagccagagacttcgagggcctcaccccgctccacacggccatcctggcccttaacgttgctatgcgcccttccgacctctgtccccgggtgctgagcacacaggcccganacaagctggattgtgtccacatgttgctgcaaatnggtgctaatcacaccaaccaggagatctagancaacaagac

SEQ ID NO: 2259 - DNA, 473 bp, homo sapiens
aagcagcactggtggtgcctcagccatggcctggaccgttctcctcctcggcctcctctctcactgcacaggctctgtgacctcctatgtgctgactcagccaccctcggtgtcagtggccccaggaaagacggccaggattacctgtgggggagacaacattgaaagtaaaggtgtgcaatggtaccagcagaagccaggccaggcccctgtgctggtcgtctatgatgatagcgaccggccctcagggatccctgagcgattctctggctccaactctggaaacacggccagcctgaccatcagcagggtcgaagccggggatgaggccgactattactgtcaggtgtgggatagtagtactgatcatgtggtattcggcggagggaccaagctgaccgtcctaggtcaacccaaagctgccccctcggtcactctgttcccggcctcctctgaggagctttcaagccaac

SEQ ID NO: 2260 - DNA, 406 bp, homo sapiens
  misc_feature (356)..(372): n=unknown
gtgcagggagaagggcttgatgccttggggtgggaggagagacccctcccctgggatcctacagctctagtctcccgtggtgggggtgagggttgagaacctatgaacattctgtaggggccactgtcttctccacggtgctcccttcatgcgtgacctggcagctgtagcttctgtgggacttccactgctcaggcgtcaggctcaggtagctgctggccgcgtacttgttgttgctttgtttggagggtgtggtggtctccactcccgccttgacggggctgctatctgccttccaggccactgtcacggctcccgggtagaagtcacttatgagacacaccagtgtggccttntngctttaagccncgnagaggagggcgggaacagagttaccgagggggca

SEQ ID NO: 2261 - DNA, 480 bp, homo sapiens
  misc_feature (413)..(458): n=unknown
cccttctctacagaagcctctgagaggaaagttcttcaccatggactggacctggagggtcttctgcttgctggctgtagctccaggtgctcgcgcccagttacacctggtccagtctggggctgaggtgaggaagcctggggcctcagtgcaagtttcctgcaaggcatctgaacacaccttcaccaactactatatccactgggtgcgacaggcccctggacaaggacttgagtggatgggtttaatcaaccctagtagttccgctactacctacgtacagaagttccagggcagagtcaccatgaccagggacacgtccacgagcacagtctacatggagctgagcaacctgagatctgacgacacggccgtctattactgtgcgataataccggggtaacggtgactanncccatcgcccactactactatggggatggacgtctggggccaangggaccacggtcaccgtctcct

SEQ ID NO: 2262 - DNA, 393 bp, homo sapiens
  misc_feature (119)..(139): n=unknown
  misc_feature (289)..(389): n=unknown
ccggcaggcagagcgtcgtggtgccctatgagccaccacaggtggggacggaattcaccaccatcctgtacaacttcatgtgtaacagcagctgtgtagggggcatgaaccggcggccnnnnnnnnnnnnnnnnnnnnnggagatgcgggatgggcaggtgctgggccgccggtcctttgagggccgcatctgcgcctgtcctggccgcgaccgaaaagctgatgaggaccactaccgggagcagcaggccctgaacgagagctccgccaagaacggggccgccagcangcgtgccttcaagcagagcccccctgccgtccccgcccttggtgccggtgtgaagaagcggcggcatggagacgaggacacgtactacttcaggtgcgangccg

SEQ ID NO: 2263 - DNA, 268 bp, homo sapiens
ggccagagactctccgaggcggcggcagagacagaagagcggggtcggggccggctgaccaggaacctgggcgagcagcggcgggggcccgagggattctgaaggaagatttccattaggtaatttgtttaatcagtgcaagcgaaattaagggaaaatggatgtagaaaatgagcagatactgaatgtaaaccctgcagatcctgataacttaagtgactctctcttttccggtgatgaagaaaatgctgggactgaggaagtaaag

SEQ ID NO: 2264 - DNA, 423 bp, homo sapiens
  misc_feature (159)..(420): n=unknown
aggttcatttttccagttttgtagaaaaatagatgttccagccaccttttacttaactgtctagtcttttaagaccaatcagtatgttccctggaaagatgaataagtctcatgactaattttttaaaaattctttaagacaaagaaataactttcttnttttactcccaaagcacagtatctcaacagcagcagccaacatgggggtttagcagcttaactttaccccctaaataaagctttgnataaaccagtgagttaccacaaaaaacaccgtccttgaaagaaaggagtggcagtcagacatcaatgcnaaacttggaatgattagataataaacatggcncttacaaaaggtagcttattagaatattccacttaagaagagggtacttttctgtccctccttgccccctcganaaa

SEQ ID NO: 2265 - DNA, 401 bp, homo sapiens
aaaactcagaaaatacgtggttggagagctcatctggaattttgccgatttcatgactaaccagttgggtgcagtggaccccatcatggagaagttcaacacatccagcctacgaccagcacctgtgggaggtggatattcaaggcagcagagcctacagccggggcatggagaaggcagggctcctcgccaaggccgagatggatggttgtggttgaggagtgggcccagggcaccttcaaactcaaccccaatgatgaggacatccacacagccaacaagtgccacctgaaggtggtcacggacctcaggttgtggatgtggcagacctgcttcacgctctcgggcctcctctgggagctcatccaggactatgggggattgggcagaagtgtcctgct

SEQ ID NO: 2266 - DNA, 560 bp, homo sapiens
  misc_feature (530)..(530): n=unknown
agggctgaatggcttgggatgcagagagagacccctcccctgggatcctgcagctccaggcccctgtgggtggggtgggggctggaacctatgaacattctgcaggggccactgacttctccacggtgctcccttcttgcataacctggcagctgtagcttctgcgggacctccactgctcgggcgtcaggctcaggtagctgctggccacgtacttgttgttgctctgtttggagggcgtggtcttctccacgctctgggtgatgagggtaccatctgccttccaggtcaccatcaagattcccggataaagttattcatgagacacaccagtgtggccttgttggcttggggctcctcacaggacggcaggaacagaatgaccgacggggtagtcttgggctgacctaaaacagtgagctgggtcccactgccaaacacatgcttcactgaattatgcttggattgaaacccccagggccagcatctggcgccagtccaggagccacgctggagcaggaacactctgnccaatccccatagtcctgatgagctccaga

SEQ ID NO: 2267 - DNA, 568 bp, homo sapiens
  misc_feature (26)..(72): n=unknown
aactgagccgcagcggcgtaccttantgtgtgccgcngtgcgcctgccttggcacggnantatgancatggnactgtccagcgttgccaactaactgttttcttcagtagagaaggtagagctccctgggcaagaactggcaccgcttctgcctgaaatgtgagcgctgccacagcatcctgtcccctggcgggcatgcagagcacaatgggaggccatactgccacaagccatgctatggggctctctttggacccaggggggtgaacattggtggtgtaggctcctacttgtacaatccccccactcccagccctggctgcaccactcctctcagccccagcagcttcagccctcccaggccaaggactggcctcccccaaggcaagaaaagccctccccatatgaagacattcactggggagacctcgctgtgccctggtgtggggagcccgtctattttgctgagaaggtgatgtcattaggcagaaattggcaccgaccgtgtctgaggtgccagcgttgccacaagaccctgactgctgggagtcatgctgagcatgatgga

SEQ ID NO: 2268 - DNA, 345 bp, homo sapiens
tcaataaacacaagttttatgagtaccttgaagctccagaatgtgctggggaaaggggttgtgatggccaggaggaggatacccttcaaaacgggctgttccctaaccagatagaaatgggaaagggaaaaaattggcagagaaagtctagactctctggcctaccatggagcctaggcccaggcccccaagatcccaccttccccaacccccatgggactggagatttttgtagcttccattggaccatgaggggcatgatgggaggcctgagttagggtgacttttttgtgagcgtctcatttgaattttatcttcactgggtcatagatgtagcagcccaca

SEQ ID NO: 2269 - DNA, 520 bp, homo sapiens
  misc_feature (246)..(269): n=unknown
  misc_feature (370)..(370): n=unknown
gctccggcctgggaggtgcgtcagatccgagctcgccatccagtttcctctccactagtccccccagttggagatctgggaccaacaaggcaccatggcgcagaagggccaactcagtgacgatgagaagttcctctttgtggacaaaaacttcatcaacagcccagttgcccaggctgactgggccgccaagagactcgtctgggtcccctcggagaagcagggcttcgaggcagccagcattannnnnnnnnnnnnnnnnnnnnnnnttgtggagctggtggagaatggcaagaaggtcacggttgggaaagatgacatccagaagatgaacccacccaagttctccaaggtggaggacatggcggantgaacgtgcctcaacgaagcctccgtgctacacaacctgagggagcggtacttctcagggctaatatatacgtactctggcctcttctgcgtggtggtcaacccctataaacacctgcccatctactcggagaagatcgtcgacatgtac

SEQ ID NO: 2270 - DNA, 319 bp, homo sapiens
catcctccagtttcttgatcttggcctcagccgtgaccttctcaagttgcagcttctgcctggcagcttcctcctcctccagctgttcttcaaggtccagcatctgctgggccatcttcttcctttcagcctgtagctgctggcccctgtcttcctcctcctccaggcgggcctccatctcatgcagtatctcctccagctcctgcttcttggccgccagccgcacccgcatctcctcagcctctgcatacagctctgtctctgcctgcagctgttcctgtagcaggttcttctcctcgggtcagctgcgagtgcttct

SEQ ID NO: 2271 - DNA, 382 bp, homo sapiens
  misc_feature (56)..(56): n=unknown
  misc_feature (174)..(186): n=unknown
  misc_feature (311)..(377): n=unknown
cagctgtcggtggcttctgctgagatggccagaggactccaggttcccctgccgcngctggccacaggactgctgctcctcctcagtgtccagccctgggctgagagtggaaaggtgttggtggtgcccactgatggcagcccctggctcagcatgcgggaggccttgcgggantccatgccagangccaccaggcggtggtcctcaccccagaggtgaatatgcacatcaaagaagagaaatttttcaccctgacagcctatgctgttccatggacccagaaggaatttgatcgcgttacgtgggctacntcaagggntctttgaaacagaacatcttctgaagagatattctagaagtatggcaatttatgaacnatgta

SEQ ID NO: 2272 - DNA, 311 bp, homo sapiens
  misc_feature (147)..(147): n=unknown
tcagaaaaaaagtaaacttgcccagcacttcatagctgtattttgggtttttatcaaattcagctccatttgacataagcaatgattatcttctcaaatacaccacccaccaatttcatagcatcattctttttccccaaagcaagnaatcatatgctgttctcagtgcactccaagccattcattcatttcacctacactctaaaggtacaaagcttcccttctttaaacacacaaggtggcacctatgaagcaggacagagatgaggactgaccattattggttaaggatcaattgcaaccatctgcag

SEQ ID NO: 2273 - DNA, 355 bp, homo sapiens
  misc_feature (335)..(335): n=unknown
ggactgtaagaatatgtctccagggccagtgtctgctgcgatcgagtcccaccttccaagtcctggcatctcaatgcatctgggaagctacctgcattaagtcaggactgagcacacaggtgaactccagaaagaagaagctatggccgcagtgattctggagagcatctttctgaagcgatcccaacagaaaaagaaaacatcacctctaaacttcaagaagcgcctgtttctcttgaccgtgcacaaactctcctactatgagtatgactttgaacgtgggagaagaggcagtaagaagggtcaatagatgttgagaagatcacttgtgttgnaacagtggttcctgaaaaaa

SEQ ID NO: 2274 - DNA, 469 bp, homo sapiens
  misc_feature (213)..(213): n=unknown
  misc_feature (420)..(420): n=unknown
aaaaacccacacatgtgggccaaatgcatccacaggccccagtatgtgactctgaaggaaccaaatgatggccccatgccaggagcagtcccattgggaagcacagtcccttctgttccaaatccagaatggccactgaaagaccccaccattttcttgtgggtggtagggggttgggagtgagtgactgctctgattcccaccacggcaganttcatggagctgaggctggagatatttgatgggctcagcactggggcagaggcacgcctaacttatagtactttctagataaaattgaaatgatggcaccagcagcccccctcaaccatgtatgatatatcttccactgctacttccaccccatcagccctttgtcctaggccaatccttctaaggtcccaccaggtctcggtgaangaactgctttgactccaggtattccatggcttcacagacatccttgcac

SEQ ID NO: 2275 - DNA, 594 bp, homo sapiens
  misc_feature (69)..(69): n=unknown
gcagcttctcctcctcctgctactctggctcccagatatcagtggagaaccagtgatgacgcagcaccnaggcaccctgtctgtgtctccgggggagagagccaccctctcctgcagggccagtcagagtattagcaccaacttggcctggtaccagcagagacctggccaggctcccaagctactcatctacggttcatccaccagggccactgggatcccagccaggttcagtggcagtgggtctgggacagacttcactctcaccatcagcagcctgcagtccgaagattttggcatttattactgtcaggagtataatgtctggcctccgcgaaccgccgctttcggccctgggaccagagtggatatcaagcgaactgtggctgcaccatctgtcttcatcttcccgccatctgatgagcagttgaaatctggaactgcctctgttgtgtgcctgctgaataacttctatcccagagaggccaaagtacagtggaaggtggataacgcctccaatcgggtaactcccaggagagtgtcacagagcaggacagcaaggacagcactacagcctcagcagcacctgacgct

SEQ ID NO: 2276 - DNA, 509 bp, homo sapiens
aaagatgagctggaggaccgcaataggggtaggtcccctgtggaaaaagggtcagaggccaaaggatgggagggggtcaggctggaactgaggagcaggtgggggcacttctccctctaacactctcccctgttgaagctctttgtgacgggcgagctcaggccctgatgggtgacttcgcaggcgtagagtttgtgtttctcgtagtctgctttgctcagcgtcagggtgctgctgaggctgtaggtgctgtccttgctgtcctgctctgtgacactctcctgggagttacccgattggagggcgttatccaccttccactgtactttggcctctctgggatagaagttattcagcaggcacacaacagaggcagttccagatttcaactgctcatcagatggcgggaagatgaagacagatggtgcagccacagttcgcttgatatccactctggtcccagggccgaaagcggcggttcgcggaggccagacattatactccctgac

SEQ ID NO: 2277 - DNA, 119 bp, homo sapiens
  misc_feature (28)..(28): n=unknown
tttgtagcaacagaatcgctaaaataanaggtgacagtagacgatatatagtatgatctcagtaaataattggttaggtttgtgaagtagagggatttgaaagaccatgttctggtggt

SEQ ID NO: 2278 - DNA, 344 bp, homo sapiens
  misc_feature (17)..(17): n=unknown
  misc_feature (227)..(316): n=unknown
tttttatactttaaatnaaatttttagatctcactaaattgagttatttaaaatctgtgatctgagaagctacttgtcaatattataactggatattacatataattttggcatatcaaaaatatttacattgcagccaacacatatggtcaatgaatacaaaaattatttataaatgcacatatatttacaatgacatccctgggcaatagggacaaaaaaaaaanttcacaagantacaaaaatctttgacctggtaccagttggtcaagcctggggattcttgccaaagaccttgaatatcaaagccccagtntcaactatctgcctgaaaaccactgaag

SEQ ID NO: 2279 - DNA, 471 bp, homo sapiens
  misc_feature (195)..(202): n=unknown
  misc_feature (466)..(466): n=unknown
gctgccccctcggtcagcccaaggctgccccctcggtcactctgttcccgccctcctctgaggagcttcaagccaacaaggccacactggtgtgtctcataagtgacttctacccgggagccgtgacagtggcctggaaggcagatagcagccccgtcaaggcgggagtggagaccaccacaccctccaaacaangcancancaagtacgcggccagcagctacctgagcctgacgcctgagcagtggaagtcccacaaaagctacagctgccaggtcacgcatgaagggagcaccgtggagaagacagtggccccctacagaatgttcataggttctcaaccctcaccccccaccacgggagactagagctgcaggatcccaggggaggggtctctcctcccaccccaaggcatcaagcccttctccctgcactcaataaaccctcaataaatattctcattgtnaatca

SEQ ID NO: 2280 - DNA, 437 bp, homo sapiens
gcagggagaagggcttgatgccttggggtgggaggagagacccctcccctgggatcctgcagctctagtctcccgtggtggggggtgagggttgagaacctatgaacattctgtaggggccactgtcttctccacggtgctcccttcatgcgtgacctggcagctgtagcttttgtgggacttccactgctcaggcgtcaggctcaggtagctgctggccgcgtacttgttgttgctttgtttggagggtgtggtggtctccactcccgccttgacggggctgctatctgccttccaggccactgtcacggctcccgggtagaagtcacttatgagacacaccagtgtggccttgttggcttgaagctcctcagaggagggcgggaacagagtgaccgagggggcagccttgggctgaccgagggggcagcctcgag

SEQ ID NO: 2281 - DNA, 503 bp, homo sapiens
gccctggaagccccagcctgggccgtcacctcggagggtctggatctgtggttcccggcagcccctgcttggaccggcatgtggcctatggcggctattctaccccggaggatcggagacccacactgtcccggcagagcagtgcctctggctaccaggctccttccacgccctccttccctgtctcccctgcctactaccctggcctgagcagccctgccacctccccgtcaccagactccgcagccttccggcaagggagcccaacaccagccttgccagagaagcgaaggatgtcagtgggagaccgggcaggcagcctccccaactatgccaccatcaatgggaaggtgtcttcgcctgtcgccagcggatgtccagtcccagcgggggcagcaccgtctccttctcccacactctgcccgacttctccaagtactccatgccagacaacagcccggagacgcgggctaaagtgaagtttgtccaggacacttctaagt

SEQ ID NO: 2282 - DNA, 474 bp, homo sapiens
  misc_feature (405)..(464): n=unknown
ctcgttcttacttgcttacattcatctatggtttcttgggtggaagacaattgaagatactcaaaaccctaggtacttctggtttcagcaagtaaatggtatgtatttacagagaagaaagggggaaaggatgaaggaagaggccaagagaggaccattgtatacacaatatgtaacatctaaaattcttgaattatgtcagtcaactcttgtattattttcatatcttgttgatttttttcttatgtaattgaataaaaccagagagttcaggcttaggaacaactgaatttctaaataactgttttcttttccaaaaagtagtatgtatacttcatacagtattgtttattgagtaatccaatttctccatagatctgatatcccagtttattatccctaggnatatagttagggtttttttttagatttaaaaataagcttctggctagatattctnccangcatcacact

SEQ ID NO: 2283 - DNA, 455 bp, homo sapiens
  misc_feature (341)..(424): n=unknown
ataaatcattaagccttctttgctggctcaattaaaatgtaagcaatgtagacttctcaaaataaacttcatatatgatgatgaaggagatgtgtgtataggatatacatgataaaatgaaaaatatttacattgaatcattctcgacatgatgtagaaaaatactgcactttcaagagcaaggcgaagtgaacacagaggaataacataaaacctgaattctattcttctttctattgccaaagccttcacccatcaagtggtattattttttttataggccatactagtaagatgaaagaagcattaaagcatagtacttgtaatttaacaattctggngtgttaactctgaatagtttagccgtgcattttaagggtgatttgatggaagactgctttcttttgntctccaaaggggcagnactaagtcacaaattcatgatctttaaaaaa

SEQ ID NO: 2284 - DNA, 407 bp, homo sapiens
  misc_feature (354)..(354): n=unknown
cccgtgaagtcttcagctcctgcagctctgaagtggttctgagcggggatgatgaggagtaccagcgcatctacaccacgaagatcaagccacggctgaagtcggaagatggagtggaaggagacctcggggagacccagagccgtaccatcacagtgaccagaagggtcacggcctacactgtggatgtgactggccgggaaggagccaaggacatagacatcagtagccctgaattcaagatcaagattccaagacatgaactgactgaaatctccaatgtggatgtggagacccagtctgggaagaccgtgatcagactgccctcgggctcgggggcagcctctccgacangctctgctgtggatatccgagcaggggccatttctgctttcaggaccagagct

SEQ ID NO: 2285 - DNA, 427 bp, homo sapiens
ccagagatgggccctgtacctctactgccctacccccaagagaagatgaaatgtccactgctggaacttggacccctcctctgccacccaagtccaagccctttgcattgacattgacacctgagcctcccacctttatcccaggcatggtgacctggagcttcgagtggccagcaccttggagctctggtcctgaagcagaaatggcccctgctcggatatccacagcagagcctgtcggagaggctgcccccgagcccgagggcagtctgatcacggtcttcccagactgggtctccacatccacattggagatttcagtcagttcatgtcttggaatcttgatcttgaattcagggctactgatgtctatgtccttggctccttcccggccagtcacatccacagtgtaggccgtgacccttct

SEQ ID NO: 2286 - DNA, 126 bp, homo sapiens
cacaaagtgtggcattacaggcatgaaccactgcaccctgccggccctggttttctcctcgcctcaaaacctcattgctgagggaggtgaaaaccctaacagctcccaagccccagttccactgca

SEQ ID NO: 2287 - DNA, 226 bp, homo sapiens
  misc_feature (24)..(223): n=unknown
gaaaaaaaagaaagtgcgcttcantacaaacgccacgttcacatncacatagnatgccagtcgctgcaaaccaaaccgcgtgtgtccgctgggtctctgggcatgcagtttnctcccactgcgggaatggggtgggggcaggccgagcctgggctctgggggctttgctgggggagcttctggtcctgggggtacccacttgtnagggagtggggggacagcngga

SEQ ID NO: 2288 - DNA, 233 bp, homo sapiens
ccctgctcagctcttggggccgctaatgctctgggtccctgtgcagagattgtgatgacccagactccactctccttgtctatcacccctggagagcaggcctccatgtcctgcaggtctagtcagagcctcctgcatagtgatggatacacctatttgtattggtttctgcagaaagccaggccagtctccacagctcctgatctatgaagttccaaccggtttctggagtg

SEQ ID NO: 2289 - DNA, 643 bp, homo sapiens
  misc_feature (632)..(632): n=unknown
taattaaagccaaggaggaggaggggggtgaggtgaaagatgagctggaggaccgcaataggggtaggtcccctgtggaaaaaagggtcagaggccaaaggatgggagggggtcaggctggaactgaggagcaggtgggggcacttctccctctaacactctcccctgttgaagctctttgtgacgggcgagctcaggccctgatgggtgacttcgcaggcgtagagtttgtgtttctcgtagtctgctttgctcagcgtcagggtgctgctgaggctgtaggtgctgtccttgctgtcctgctctgtgacactctcctgggagttacccgattggagggcgttatccaccttccactgtactttggcctctctgggatagaagttattcagcaggcacacaacagaggcagttccagatttcaactgctcatcagatggcgggaagatgaagacagatggtgcagccacagttcgtttaatctccagtcgtgtctccagggtcttgtgcatcttgcatgcagtaataaactccaacatcctcagcctccacccggctgattttcagtgtgaaatctgtccctgaacccgctgccacagaacctatctggcactccagagaaaccggtttgnaacttcataga

SEQ ID NO: 2290 - DNA, 536 bp, homo sapiens
  misc_feature (57)..(57): n=unknown
  misc_feature (452)..(474): n=unknown
aggggacccacagttcacggaggaggctctaggtcctggaagaataaagtgggtganggaggggggtatagggatggaaatgagggatccaggggtcaaggccagattctaaactcagactccagagatcagagaagaaggaacacagcctgccctgggtatatggagaaattgaggctgtagaggagaggggctgggccaggatacctgtgaaaggtgacttgggagggctcctaggaaggcacagagctgtctgctctccacagggcatgagtggaaaggatggggaaagaagaggagagaaccccgggtggaccggatggccacactgtgaaccctcccagagactttagacagagagaggggctccacaacaccccggtattctgtctgccctctctcacccccttccctgtccacacaggtcagcccaaggccaaccccactgtcantctgttcccgccctcctctgangagctccaagccaacaaaggcacactagtgtgtctgatcagtgacttctacccgggagctgt

SEQ ID NO: 2291 - DNA, 442 bp, homo sapiens
  misc_feature (438)..(438): n=unknown
agtgcagggagaagggctggatgacttgggatggggagagagacccctcccctgggatcctgcagctccaggctcccgtgggtggggttagagttgggaacctatgaacattctgtaggggccactgtcttctccacggtgctcccttcatgcgtgacctggcagctgtagcttctgtgggacttccactgctcgggcgtcaggctcaggtagctgctggccgcgtacttgttgttgctctgtttggagggtttggtggtctccactcccgccttgacggggctgccatctgccttccaggccactgtcacagctcccgggtagaagtcactgatcagacacactagtgtggccttgttggcttggagctcctcagaggagggcgggaacagagtgacagtggggttggccttgggctgacctgtgtggacagggaangggg

SEQ ID NO: 2292 - DNA, 473 bp, homo sapiens
  misc_feature (228)..(286): n=unknown
  misc_feature (464)..(469): n=unknown
cggggctgtccccacggggcacatactgccatctcccctcgtcctgcgtcccggacccatctacgctgaggacggagaccgcggcatcaaccagcccatcatctacagcatctttaggggaaacgtgaatggtacattcatcatccacccagactcgggcaacctcaccgtggccaggagtgtccccagccccatgaccttccttctgctggtgaagggccaacaggncgaccttgcccgctactcagtgacccaggtcaccgtggaggctgtggctgcngccggnagcccgccccgcttcccccagagcctgtatcgtggcaccgtggcgcgtggcgtggagcgggcgttgtggtcaaggatgcagctgccccttctcagcctctgaggatccaggctcaggacccggagtctcggacctcaactcggccataacatatcgaattaccaaccactcacatttnggatngagg

SEQ ID NO: 2293 - DNA, 231 bp, homo sapiens
  misc_feature (30)..(222): n=unknown
ggagcgagacctccagtgcccgtgcggctngnggagagggtggaggngccacttagatgtaggagtcatcaccaccggncgcatcgtagggncccccacccctccccgctccctcnccctcatcnccgctnccggnttcactngtgccatccacgtncagnnttntnncgntganancnaccacgtctncntccgtcccgatgtcctctccaaaccagacanccttgtacc

SEQ ID NO: 2294 - DNA, 362 bp, homo sapiens
  misc_feature (316)..(337): n=unknown
atcacctaaaaagctgctaccaagacagccacgaagatcctaccaaaatgaagcgcttcctcttcctcctactcaccatcagcctcctggttatggtacagatacaaactggactctcaggacaaaacgacaccagccaaaccagcagcccctcagcatccagcaacataagcggaggcattttccttttcttcgtggccaatgccataatccacctcttctgcttcagttgaggtgacacgtctcagccttagccctgtgccccctgaaacagctgccaccatcactcgcaagagaatcccctccatctttgggnggggttgatgncaganaccancaggttgtagaagttgacaggcagt

SEQ ID NO: 2295 - DNA, 49 bp, homo sapiens
  misc_feature (4)..(49): n=unknown
agcnngganactacaatcaaatgcccccctattntggctgttgcccccn

SEQ ID NO: 2296 - DNA, 495 bp, homo sapiens
  misc_feature (39)..(479): n=unknown
ggtttgaggaagcttcgcactccgctttcgaggccagcngaggcggggggcggggatggacacgccccctccctgtctcccaccgatgattggcgcacggaactccgccttgggtttggaaggctcgcntgggagctcatacctggctggggccgaggattngctgttccggggctagggagcgctttctcccgggaaccgcggctgtgacccaagtggcccggaccagtttggggctgcgtnngcctgcctcaagcaaccaggtacgtaggtcggcggcccagctcggcgctgcggtgggagccggagggcgacagtcagagccggggtgccagcnggacgcgaccgccagatccacttaggaccccgtcgttctgcgaanggccacgtctgantcccggggcctcctcgtgctgcagntgtcgccttaggacctcggccaggataccctctgccatgctcttgtgctgnccgtgatnaccgactggcccttgt

SEQ ID NO: 2297 - DNA, 526 bp, homo sapiens
  misc_feature (463)..(509): n=unknown
ttccctgtgctatcctgatggtgtgggggtgtggaacaggctgctggaaccatggtttacagtagtagcaggtagatgattagtagcatgagtggtgaaatgctgcatctaagtgcctgtcactttgctcccaggggaatatcatgcagcccaggaatagtgttagactgggaaggactgtggcaggaacagtcactgtctctcctcattttggtgaggaatgggtcccacataatggagagctcaacagaagcatccagtcttgttctgaatggagcaggtcagtggcagcagcctcttgctttcatttacccctttgggctgcttgcctaaagtctctcttccttcacctccccaggccttttggcaagagggaagacactgccattcctggctctttccctggatcagtgtctgatctggtggaggtagcttgtggggctgacttcctccagttccggcngatcctggcacttttcttcctagagtgcagatactgctcactggangctgtctctgtggcact

SEQ ID NO: 2298 - DNA, 204 bp, homo sapiens
tggaagaataaaacagcccattagccaaagcaacattaacaacaaagcaatcctggaggcctcacattacctggcttgtactacaaagctacagtaatccatattacatggcttgctacaaaaatacacatgtagaccaatagaaagaagagaaagccctgaaataagtttacatttctacacccaacttttttctgacaaagt

SEQ ID NO: 2299 - DNA, 202 bp, homo sapiens
  misc_feature (49)..(49): n=unknown
gactttgtcagaaaaaagttgggtgtagaaatgtaaacttatttcaggnctttctcttctttctattggtctacatgtgtatttttgtagcaagccatgtaatatggattactgtagctttgtagtacaagccaggtaatgtgaggcctccaggattgctttgttgttaatgttgctttggctaatgggctgttttattctt

SEQ ID NO: 2300 - DNA, 409 bp, homo sapiens
gcggccgcggcggcagcagaccccagagtcagaaggagtgagaaccctgacccctaatcccactgcatccagccaataggagcccagccaccatggcggagtgcaggaggtgcagatcacagaggagaagccactgttgccaggacagacgcctgaggcggccaagactcactctgtggagacaccatacggctctgtcactttcactgtctatggcacccccaaacccaaacgcccagcgatccttacctaccacgatgtgggactcaactataaatcttgcttccagccactgtttcagttcgaggacatgcaggaaatcattcagaactttgtgcgggttcatgtggatgccctggaatggaagagggagccctgtgttccctttgggatatcagtaacccatctc

SEQ ID NO: 2301 - DNA, 450 bp, homo sapiens
  misc_feature (15)..(433): n=unknown
gaagttgtgggagangggagggcaccctccacncatagtacanntncgccantccctaaaggnntacanagaactatccttccncncctgctccnanactgctggccangaccctgcccggggangntgcntgcncacccncctgnctgctgtactagtgcagccaaacggnnccaggccccttcctgttgccccaggaccaatccttccccanactcgttcactgnccgccaantcccattccaacttcctttttacactggnngtttctatcacatnctgagggccactaaccnaccagcaagtctccccctgacacacattcacgtaggtcncatacncttcagagtcctaaagggttaatnagaaggncanctcagctttggtgaatggagcnccagccccaaatnccctccccttgcaaatatggganaagtagggagagtctga

SEQ ID NO: 2302 - DNA, 436 bp, homo sapiens
  misc_feature (108)..(430): n=unknown
agccggagcctccgcgagtgaaggaagacgaatgcgtgacccgaccggctgtggtgttccagtccccactgaccagtaggagcagcagggcgtcggcttgtgaggtanangggtggggagtctggcggcgganagcagctnntngttgngagggggttcggangagaatggngagggggcggaatctctgggtaccgcagacgtgaganaacccctgcngcctaangggccgcatccctttcttcccaaaactttctccttgtccctactgtgccgagacgtaaatttatttgtatctttntatttttctctttggaaaaagtaaancctgtgatgtgtcatgtgactganctgtctaggangganggtgaagatgtggggggttcttagggccacccgaaaggtgcagtggtgaacaaganggacaggncagagt

SEQ ID NO: 2303 - DNA, 310 bp, homo sapiens
  misc_feature (299)..(299): n=unknown
agcagtcctcaggtgcaaccccctgcgtggtcctctgtggcagccttctctcattcagagctaaaaagaaaactcagtagaagataatggcaagtccagactggggatatgatgacaaaaatgtgctgaaaggtggtcctttctctgacagctacaggctctttcagttccattttcactggggcagtacaaatgagcatggttcagaacatacagtggatggagtcaaatattctgccgagcttcacgtagctcactggaattctgcaaagtactccagccttgctgaagctgcctcnaaggctgatgg

SEQ ID NO: 2304 - DNA, 441 bp, homo sapiens
atagacatacaaatcacttagttgtaattttaaagaattcctcaaactaaacttgaatttaagcataagcttatgcttacagattactatttgctagcttactaattattatttgaattaagcagtaagaactaaaatttaagtttcttagttttacagattgatttgaaggcatgctgtcttgctaatattgaaataaatttatttcttaaaaattattattttactggattatgtcagaagcagggctgtgttcttgaggaaggacaagtttcttctcagaatcatcaaaatgaagctctcactgttctgcccttcagaggttgggttgggcggttgttgtgctgcatggggacagcgttatcaccttcaacatttgatagaaggctgcggaattgtgccagctgctctgagtgacactggatgctctccttacagatg

SEQ ID NO: 2305 - DNA, 289 bp, homo sapiens
  misc_feature (3)..(153): n=unknown
gtnnggnagcncggngccggnncccannggaccccgggccacggatancgggaagangatggattncccggccctcccccccggatggaaganggaggaagtgatccgaaaatctgggctaagtgctggcaagancgatgtctactacttcantccaagtggtaagaagttcagaagcaagcctcagttggcaaggtacctgggaaatactgttgatctcagcagttttgacttcagaactggaaagatgatgcctagtaaattacggaagaaccaaacagagactgcg

SEQ ID NO: 2306 - DNA, 600 bp, homo sapiens
tggaagaatgtacaggtgtcccctttcaataaagtataaaaatatgtttatatacagtgaagtcacaataatctttaactgggaaatttatttagaattcctgatctgttcttattaaaactgtgggggaaacaaatgttttacgtaagtgctacatttccagtagattgcacctggcatcaaaagctcagcttcatcttagggtcctgcttgatattacaaaagactaattttaagtcctaggactcaaaataaacatgattttttgaataatagatatatacatcaaaaatacatctaaaaaggcattggttagtgctattaaaaagctctatgtgctcgggtacattttttttcttacaggcaaaagccagtggaaacatttttgttcaatttctaggaattttctcttggggaaagtcggtcgaaagttacctgatcatattcttaggcttcatctccactgtccatttcaatatccatctcttctgtatcagcagctcgcgacaagatgtctgccatcagtgcttcttccaattttcttgcgtacttgctgtacctcgctcttcctggtttcctgatggtcttccatctggtgga

SEQ ID NO: 2307 - DNA, 426 bp, homo sapiens
  misc_feature (43)..(43): n=unknown
  misc_feature (190)..(416): n=unknown
aacgatgatcacagtgtccgtgtggcccgtgaagatgtcaganagagttgcccacctcttggtctggaaaccttaaaaatcacagacttccagctccatgcctccacggtgaagcgctatggcctgggggcacatcgagggagactcaacatccaggcgggcattaatgaaaatgatttttatgacggancgtggtgcgcgggaagaaatgacctccagcagtggattgaagtggatgctcggcgcctgaccagattcactggtgtcatcatcnagggaggaactccctctggctgagtgactgggtgacatcctataaggtcatggtgancaatgacaancacacgtgggtcactgttaagaaatggatcttggagacatgattattttaggggaaaccagtgagaagggagatncctgttctcc

SEQ ID NO: 2308 - DNA, 443 bp, homo sapiens
  misc_feature (65)..(98): n=unknown
  misc_feature (212)..(420): n=unknown
ttccgaagtgggagcgaacctggggcggccccccgccccccggccgcagccttcggaggagactnggccgccnaggcggtcgtgananacggacgganaggaagcgccggctggaatctcctaaccgcccgcttctcatcttgtcctggggcagggacctcaggatggaaaccagcagcctgcaccgcccgagaaggtcggctgggtccggnaattctgcgggaaanggattttcagggagatttggaaaaaccgntatgtggtgctgaaaggggaccagctctacatctctgagaaggaggtaaaanatgaganacatattcaagaggtatttgacctgagtgactatgagaagtgttaagagctccggaagtccaagagccagggagcaagctnatcatagcgagtttantcttgccnactccaaacagcccggtaacacg

SEQ ID NO: 2309 - DNA, 457 bp, homo sapiens
  misc_feature (117)..(117): n=unknown
cttctctctaagtcacgggaatgcccttgctacttgtgacctgccctttactcagcagtttttgttctgggaagccctgggatctgctaatacctatcactgtaggtgctgaagggnaaacagatgaagaacatgacctcaaggagcttcctgtcaatgagaagaccaagctgacgcctggcaaagatattaaagaggagcctgaaactgttccttggacatcttatgaatgtcagaaaataccttttggagggttagaagatcaggggacatggttgttcacatttgctgccacggaacaccgccagtcttcacttggaaacagaatccacgccttgtgaagagatcatccctaagcaggagagaagctactaaaagatacaaagtaaatggatacaatttaagctttccttgagtcaacaatcttctcactaaagatccaatttactacaccgtg

SEQ ID NO: 2310 - DNA, 275 bp, homo sapiens
  misc_feature (108)..(226): n=unknown
atgtagactagtagagtgtcagtttcagtcatttgaaccatacatttgaaccatagctgagaaccagaaaatcagtaaataaagcctctgaacagaataaatactggngtataatatcaaagaatccatgtaaagatacgnattttactgataggagctcctgtctggtagtccttagagtgtgttgcnctttactatacaagattgttttccaaacttcagtggntgagaagtagcagattggccttgtttattgcagtagtttttgaggattt

SEQ ID NO: 2311 - DNA, 499 bp, homo sapiens
  misc_feature (377)..(491): n=unknown
gtcctggtctgcgtggaggtcgacgactccgtcgcagatacggacctgtctgggtctcagccgccaaagaccccgtccggtaggtgagtggctcactttgagggcaagccttctcggatcgaggcttcttcatggccgctcagatcgtgagcggccggggctgctctctttgcggaggatggcgtctaatgagcgcagttgattcgaggaagtactagccggacatcatgagtggctgtcgggtattcatcgggagactaaatccagcggccagggagaaggacgtggaaagattcttcaagggatatggacggataagagatattgatctgaaaagaggctttggttttgtggaatttgaggatccaagggatgcngatgatgctgtgtatgagcttgatggaaaagaactctgtagtgaaagggttactattgaacatgctagggctcggtcacgaggtggaagangtagaagacgatactctgaccgntttagtag

SEQ ID NO: 2312 - DNA, 486 bp, homo sapiens
  misc_feature (332)..(468): n=unknown
aatgtgtctgtccagcagctgttaaagagtggaggacacccttgaccctaacaaggaaaacaaattaagcctttatgtacaagcaaatttagagctcttttaagtgtccaaagctattaattagtttaattaaggcattaaactaattctgaattaacatttttataaccaagaactaaaatgttcaaatttttttctagtacaaaaaaattaaatttgctttagttataaaagaggctctgtcaatatacacaaactatatacttcagacattcacaaaaatgtgagcagaaggcttatcaaaagacatttaatacaattagttttcaacnnccccttggtggtccacatctacaaagatatccancccancccaaccccccttccaaatcccacccccacagaaaagcacatacttaccagaatttttagcaagtatggtttgggaatttttgtggttttggttnntaaaaaaaaaggcccccc

SEQ ID NO: 2313 - DNA, 369 bp, homo sapiens
  misc_feature (95)..(237): n=unknown
tgaggagggaggcagaagctgttggagggtcttcaggtgtggaactatttatcttctccctgtgaagtgccccctcccatgctcccccaaccagncggggagannnnnnnnnnnnnnnnnnnnnnnnnncatgggtttgtgtgcatttgcatttgttggggcatggggaagtctcagatgacgaggtcccagctcaagacatgtggaggggaattgtcagtacacacctgctcccanccctcaagacctctctcctctatggcttatttgagatcaaatcaaggccccagggtcaggcagcctgtggccaatgaatagggcaaggctaagggtgggattcctggaatccaggcctagttctagatcgcg

SEQ ID NO: 2314 - DNA, 372 bp, homo sapiens
  misc_feature (46)..(343): n=unknown
ctctcgggcactgctgccatgaatgccttcctgctctccgcactgngcctccttggggcctgggccgccttggcaggaggggtcaccgngcagaatttgcgggntccagagtgtccagcatcacggagccaagccaggacgnggggcctgaactcngcccctcacagtgccccactgtggatcgcctggctcccatatgccacgaacactgcctganggaaatttctccttttctctggagtcagtgaagaagctcaaagacctccaggagccccaggagcccagggntgggaaactcaggaatttgcacccatccctggtgaacctgnggntcccatcctcngtagcaacccggaatttccagaagaactc

SEQ ID NO: 2315 - DNA, 471 bp, homo sapiens
  misc_feature (384)..(459): n=unknown
acaggaccagccactagcgcacctcgagcgatggcctatgtccccgcaccgggctaccagcccacctacaacccggtggtggtaaatggaaatcccttctatgagtacgggcaccggcttcccctacagatggtcacccacctgcaagtggatggggatctgcaacttcaatcaatcaacttcatcggaggccagcccctccggccccagggacccccgatgatgccaccttaccctgtaagtacttgctgataggtgagggtcttcctccctagtggggtccctcagcccctctcacccttcctgccttctgtccatcgttcagggtcccggacattgccatcaacagctgaacagcctgcccgtgagtgggagggctgggangggcccgggtgaagagtgggaatggtgagaatggggtaaggggagtaagaggggttgaagccaaggtgtactaanccagcactagag

SEQ ID NO: 2316 - DNA, 243 bp, homo sapiens
aggggataattctgttttcccatgagttatggccccaggaatagattagatctggacataggacaaggtgacatcaccctggatttccaatgtgtccaccctctggaaggccgagaggcgatgggcaaagtcaaagaggtgctggccattggcgtaaaccttgaagcgatccaagccacagcgaatggacagatcaaagaactgtccgggaccaaatgggttgtgggtgatcttcttctcctc

SEQ ID NO: 2317 - DNA, 434 bp, homo sapiens
  misc_feature (244)..(414): n=unknown
aaaaccagcagtaatcctgcctctgaagtttatcaggaaaggagcttaaaagagaaccaaattcagcctgtgttggaactctcagtcccagaggggtgtggtttgtagctctccggcctgctgttggacttaggctgtgacccacagaaggacgccagaaagtactcaagacattcacggtgccccggtcagcactcgccatgacgaagacttctacatgcatataccacttccttgttctganctggtatactttcctcaattattacatctcacaggaaggaaaanacgaggtgaaacccaaaatcttggcaaatggtgcaaggtggaaatatatgacgctgcttaatctgctcntgcagaccattttctacggggtcacctgcctggatgatgtgctgaaaagaaccaaanggggaaaagacattaagttc

SEQ ID NO: 2318 - DNA, 377 bp, homo sapiens
  misc_feature (27)..(330): n=unknown
gtaggagggacagagagtgatacttanattnaataagaggttcgtgaaggtagcttaacttganaactcttggttttttgaaaggttgactgcacatgcnatnnacaactcctgctatctcagaattaattatcttngaccttcgtggaggatggtctctggttaaaatctggccaaaganactcacataaacgtggtgttagagaacatctagagagagagagaggaacttagagtcatttaaactcttcagtttacagagaaggatgctgaggncctagatgagaagttacctgcaaaaggcaaaagggttacttagtgtcaganccnagggcaatgacttctctctcccagatctcctagccactgggcctggg

SEQ ID NO: 2319 - DNA, 303 bp, homo sapiens
  misc_feature (2)..(282): n=unknown
tnatgtccaaggtaagntattaaaangcangttacttccaaatcgcactgaaggaaaangttaagaataatacatgatcacagaaatgcataccactgtctgtaaacccaacaaaattcantgttctcttttggattnatttagcctgatgtatttttnattcaatttttatggtgatgggcaantcattcttggtaaatgtaantcaaacatgattgatttnaaacttcatggaanttgnagaaaattatggacntttttggtgagaaagaacaatagtcnaaactcacatggatagagtgt

SEQ ID NO: 2320 - DNA, 491 bp, homo sapiens
  misc_feature (314)..(314): n=unknown
atataaccattttgttacaaattttgcattttccacatgaaaaaaatcacagtaggcacatactagaagcaaaatatgtcagacaaaaatatcctaaagatgtttctgttatcaaacttttacaatttttccaagacgtttttgaggtttgggaaaaagtctggggcatttttggcaaaaaacaaacacactctatccatgtgagttttgactattgttctttctcaccaaaaatgtccataattttctacaaattccatgaagttttaaatcaatcatgtttgatttacatttaccaagaatgatttgcccancaccataaaaattgaattaaaaatacatcaggctaaataaatccaaaagagaacagtgaattttgttgggtttacagacagtggtatgcatttctggtgatcatgtatttattcttaaccttttccttcagtgcgatttggaagtaacctgccttttaatagcttaccttggacatc

SEQ ID NO: 2321 - DNA, 430 bp, homo sapiens
  misc_feature (93)..(343): n=unknown
gggaactagagccaaggcgagagacccgtgccagccccgaggctcccggggcccatgggcccaggcatcgggctggtacagggccccggggcnctctcagcccatctgtnanccctcccccccaacacccagatgtcccgtcttggcagtgctgtcccggactgccacattaatgctcaagaacccgccagctgggcccnnnggccggtggggctcctgcagagcantggacaaaggcgaggganggagggaaggggatcctaagcacccctccctccctggccctaggaggcagacatgcccgatgagatcaacattgatgaattgttggagttagagagtnaagaggagagaagccggaaaatccagggactcctgaagtcatgtgggaaacctgtcgaggacttcatccaggagctgctggcaaagc

SEQ ID NO: 2322 - DNA, 402 bp, homo sapiens
  misc_feature (32)..(33): n=unknown
  misc_feature (286)..(392): n=unknown
gctggctctctgctgccacagctccgccgaannagggggtggaagaggaggactaaactcagagctgagaggagaggcaggtgtgtgcaggtgcatcacctggatcatgaggtcacccctctgctggctcctcccacttctcatcttggcctcagtggcccaaggccagccaacaagacgaccaagacccgggactgggcccgggcgcagacccaggcccaggcccaggcccacacccagctttcctcagcctgatgaaccagcagagccaacagacctgcctccncccctncctccaggccctccatctatcttccctgactgtncccgcgaatgctactgcccccctgatttcncatctgccctctactgtgatagccgcaacctgcganaggtccctgt

SEQ ID NO: 2323 - DNA, 329 bp, homo sapiens
  misc_feature (7)..(319): n=unknown
acagaangccaggagtntgggcgcgcactggctgtcanccaactgggnggaaccaaactnagtccatnnactctcnnnccntaggntntacanttatatgaagttcccctnnctgctctcgagtntcacaagaantnatncaaannggagntanngantcagnangtatttanncntgacttccacggtggctcttctgtaanganatgcttgaacccaaagagagaacatgcagatcntaatcagttcatatttataatcttgggctggaggcaaatgcatacagtttaccaaatatgaaaaggtgaggtgggcaannagaaatgccc

SEQ ID NO: 2324 - DNA, 254 bp, homo sapiens
ctatctgtcttttgggaaagacagtggcacaagtttcaatgccgtccccttgcaccccaacaccgtgctccgcttcatcagtggccggtctggttctctcatcgatgccattggcctgcactgggatgtttaccccactagctgcagcagatgctgagcctcctctccttggcaggggcactgtgatgaggagtaagaactcccttatcactaacccccatccaaatggctcaataaaaaaatatggttaaggc

SEQ ID NO: 2325 - DNA, 234 bp, homo sapiens
ttagtgataagggagttcttactcctcatcacagtgcccctgccaaggagaggaggctcagcatctgctgcagctagtggggtaaacatcccagtgcaggccaatggcatcgatgagagaaccagaccggccactgatgaagcggagcacggtgttggggtgcaaggggacggcattgaaacttgtgccactgtctttcccaaaagacagatagcggcccttgtctgtcacaaa

SEQ ID NO: 2326 - DNA, 466 bp, homo sapiens
ctagccgggagctcagccgggaaagggatccccaagcgggccacccggctgcccagatggaagcagagccagcagagcctctcgctgcagcagtggaagcggccaatggggctgagcagacccgagtgaacaaagcaccagaagggcggagctctgagcgctgaggagctgatgactattgaggatgaaggactcttggacaagatgctggatcagagcacggactttgaagagcggaagctcatccgggctgcacttcgtgagctccgacaaaggaagagagatcagcgggacaaggagcgggaacggcggctgcaggaggcacggggccggccaggggaggggcgcggcaacacagccactgagaccaccacgaggcacagccagcgggcagctgatggctctgctgtcagcactgttaccaagactgagcggcttctccacttccaatgattggcacacggaa

SEQ ID NO: 2327 - DNA, 502 bp, homo sapiens
  misc_feature (10)..(85): n=unknown
  misc_feature (421)..(421): n=unknown
agggtgtcgnaacanacagggcagtggtgggcggacgcacaggcaggagacggtgcccggagagtgggggcggcagcttgccacnggctggccatgcgggcgggcaggctagacattcttgccgcgcaggcgcagttcgtggcgtcgcaggtggttgtagagcgactgcacataggtgaagacacacttggggtcaggcttcttgcccatgatcatcatgtcgtccacctccaccaggggcacacagtccaccagcatctccgcagatgagaaggccacctcgaagttctggcgtcggttctgagggctaagctgcccatagtcgaaggcctcagggaagaagttgtgcaccagggcacagaaggccatcccatcactccagctggaggagaagttctggatgtcgacgtgctcgtagccncgagtcttggctcgacaccagtccagcagcatctgcttgatgctgttggcgttggggaccccgaagctggtggatcgctgc

SEQ ID NO: 2328 - DNA, 357 bp, homo sapiens
ctcctttgctgcttaataaattctgaacttggtctccatgctgttttcctgccctccagagagcacctctatcgccaccacggagcactggttcactcctgacaccctggcacttactgacacccccagcccctgcactgagcccacccacaaaacaccatggcccacgctgaaacccctctgcacaggcactccctggctgtcgctctctgattcaccactgcatgtgggcacgtgtggccccatcaaaccatgaccgcctctggtgccaatccctgacctcagagcacttagctggggttccaggatcaaacagagtgactggaaaggaagtagggtggtgaggtgcaggacagg

SEQ ID NO: 2329 - DNA, 575 bp, homo sapiens
  misc_feature (12)..(12): n=unknown
  misc_feature (336)..(550): n=unknown
aaccatagcctngctgggggtggggctggccctcacaggttgttgagttccagcagggtctggtccaaggtctggtgaatctcgacgttctcctccttggcactggccaaggtctctgtgaggggaagcagcaggtgagggagaagggagacacaagggggagacgtggggaggcagggccaggggaaggtgacatatagacatggagtcggtcaaggaagacacatgcattcacggacctcagggccccatggcagggacaaacagatggactgactaggatgaggggaacaggacggacgtggatgcctcactcaaggccttggggtcatagangtggggtngggagggctgagtcataaactactttatcctcttctttagaaggtttaangaagttggagacagaaggtaagacaaagactgcgccaggaaaggaagggccagacagacagacttgangtagaaaacagacctgctgctgcagtgaaagccccatgttgctgatatccaacatttttccaagctccanttccagaccttttgcaancttcttgcccctgtcctgcacctca

SEQ ID NO: 2330 - DNA, 440 bp, homo sapiens
cccagtcctgtcctatcactctaattcggatttgccatagccttgaggttatgtccttttccattaagtacatgtgccaggaaacaagagagagagaaagtaaaggcagtaatgccttctcctatttctccaaagccttgtgtgaactcaccaaacacaagaaaatcaaatatataaccaatagtgaaatgccacacctttgtccactgtcagggttgtctacctgtaggatcagggtctaagcaccttggtgcttagctagaataccacctaatccttctggcaagcctgtcttcagagaacccactagaagcaactaggaaaatcacttgccaaaatccaaggcaattcctgatggaaaatgcaaaagcacatatatgttttaatatctttatgggctctgttcaaggcagtgctgagagggaggggttatagcttca

SEQ ID NO: 2331 - DNA, 489 bp, homo sapiens
  misc_feature (473)..(473): n=unknown
aattttcatacataattcagacatgatcttagccaggaaaaattaaataacacagcacagcatggatgagggaaagtatgcacagtccgtgtcagggttagaaaaccctgaaagaggtacctgagtatagagaactccaagctaatcctcctggagaaagcctcttaggcctaacatgagatcaggtaagcaatatagaataaaacctttctcttagccccaaagagattccatctgtgtagaagactgggtgagaagtacatttgcctgtcttcctcctgtccttcctttttattataagatacatttatagaccccatagaagaaaagataaatttcagaggctgttaaaagaggctaggcctaagttataatcctcctcctcacagccccatttccccaaggggcatttagcaccagtgcagtttctagctgtaaacaatgccaccagcatgagtgatagtgtcctgtanggtgctcccacttctc

SEQ ID NO: 2332 - DNA, 405 bp, homo sapiens
  misc_feature (339)..(339): n=unknown
ggggcgagcgccacgcggcgtccggggcgagtgacacgcagagctgaagccatggttcatcaggtgctctaccgggcgctggtctccaccaagtggctggcggagtccatcaggactggcaagctggggcccggccttcgggtgctggacgcgtcctggtactcaccaggcacccgagaggcccgcaaggagtacctcgagcgccacgtacccggcgcctctttctttgacatagaagagtgccgggacacggcgtctccctacgagatgatgctgcccagcgaggctggcttcgccgagtatgtgggccgcctgggcatcagcaaccacacgcacgtngtggtgtatgatggtgaacacctgggcagcttctatgcttccccgggtctggtggatgttccgtgt

SEQ ID NO: 2333 - DNA, 434 bp, homo sapiens
  misc_feature (397)..(397): n=unknown
agccttgcacagcaattctaaaaacatgtcatctccttcacctaagaggtaagaaccggctgtaagtcatggggtcactaaaccggccgcagttacagtaagcagaagaggtcacggctcaggccttctcagactttccctgggacacacggctctctgggggggcccggcgaaaccactcggaccaggagccatcgtacacggccacatcaggcttgccgcagaggtaggcagccaaggccacgtggcaggcggtgactcccttgcggcacgtggcaatgagaggctgcgagagatccaccttcttggtctggaacagagcacggagctcttctgggcccttctcgaagccatcctcagtcaggaagtccatgaaaggcatgttgacggcaccacngatatgggcccgagtccagtcctactgcatccggctc

SEQ ID NO: 2334 - DNA, 371 bp, homo sapiens
  misc_feature (335)..(335): n=unknown
gtcacactcacttgtgccttgagctctggctcagtctctactagttactaccccagctggtaccagcagaccccaggccaggctccacgcacactcatatacgacacaaacagtcgctcttctggggtccctgatcgcttctctggctccatccttgggaacaaagccggcctcaccatcacgggggcccaggcagatgatgaatctgattattattgtgtcctatataggcgtagtggctcttgggtgttcggcggagggaccaagctgaccgtcctaggtcagcccaaggctgccccctcggtcactctgtttccggcctcctctgaggagcntcaagcaacaagggcacactggtgtgtctcataagt

SEQ ID NO: 2335 - DNA, 402 bp, homo sapiens
gggagaagggcttgatgccttggggtgggaggagagacccctcccctgggatcctgcagctctagtctcccgtggtggggggtgagggttgagaacctatgaacattctgtaggggccactgtcttctccacggtgctcccttcatgcgtgacctggcagctgtagcttttgtgggacttccactgctcaggcgtcaggctcaggtagctgctggccgcgtacttgttgttgctttgtttggagggtgtggtggtctccactcccgccttgacggggctgctatctgccttccaggccactgtcacggctcccgggtagaagtcacttatgagacacaccagtgtggccttgttggcttgaagctcctcagaggagggcgggaacagagtgaccgagggggc

SEQ ID NO: 2336 - DNA, 286 bp, homo sapiens
  misc_feature (160)..(160): n=unknown
aggaaggaaagggtgagggaggctgagtgtccacgtggcctgtggtgaatccaccaagctccgtgcctcctcacaacctttgcatctgctgttccctctgccgggaacaccgtttctgcggctggctcctcatcgtctaggcctctccttgtgccctttncccccttggaggccctccccgagcaccctagttagagtcccaccccatgccccaccccagctgctccgtcacattttccagatgtatttcttcgcaggactttttgttctctgaaattatcttgcc

SEQ ID NO: 2337 - DNA, 125 bp, homo sapiens
  misc_feature (2)..(123): n=unknown
antagtctcgagggggatccttgcgagaacctgttctgactttagaagcacttcctgtngacaatggagggccctgcctcatcatactcaggcttgctgatccacatctgctggaaggtgganag

SEQ ID NO: 2338 - DNA, 518 bp, homo sapiens
  misc_feature (44)..(49): n=unknown
  misc_feature (342)..(505): n=unknown
ccgagccccgtgcttggcaacattccccccaacgatgggatgcngggangccccatcccgccaggtttctttcagccttttatgtcaccgcgatacgcaggcggccccaggcccccgatcagaatgggaaaccagcctccgggaggagttcctgggacacagccattgctgcccaattctatggatcccacacgacaacaaggccaccccaacatgggaggatcaatgcagagaatgaaccctccccgaggcatggggcccatgggtcccggcccacagaattacggcagcggcatgagaccaccacccaactccctcggccccgccatgcccgggattaanatgggnccgggagctggcagaccctggcccaatcctaacagtgctaactcaattccagattcctcctcatcacctggtacctatgtngggacccctggtggtggcggtnntccaaggaanaccantatgcccagtcccgcagattcaacaaattccagtgacnacatctacacaat

SEQ ID NO: 2339 - DNA, 260 bp, homo sapiens
  misc_feature (260)..(260): n=unknown
tgctagaagcttccatttaaaaaaattttcccccaaaaaacccccctgaaaacaaataaaaaaatcccaacaatggtaaaaccccaaacaaaaaacaacaaaaaagtgtcatgtacagaaaaggtcctttggggaaagggcaaggggtgggatttttctggtcactgacttgaaatacatttttgagagttttgtccttcttgttttatggaataaaaagtttggcctttttattgcatgaaactaaaattgggaaaggn

SEQ ID NO: 2340 - DNA, 533 bp, homo sapiens
  misc_feature (47)..(47): n=unknown
tatgaagtcatggcccagaagaaccttcaagaggccaaagaacagtntgagagacagactgcagttctgcagcaacaggtcacagtgaatactgaagaattaaaaggaactgaggttcaactaacggagctgagacgcacctcccagagccttgagatagaactccagtcccatctcagcatgaaagagtctttggagcacactctagaggagaccaaggcccgttacagcagccagttagccaacctccagtcgctgttgagctctctggaggcccaactgatgcagattcggagtaacatggaacgccagaacaacaaataccatatccttcttgacataaagactcgacttgaacaggaaattgctacttaccgccgccttctggaaggagaagacgtaaaaactacagaatatcagttaagcaccctggaagagagagatataaagaaaaccaggaagattaagacagtcgtggcaagaagtagtggatggcaggtcgtgtcatctgaagtcaagaggtggaagaaata

SEQ ID NO: 2341 - DNA, 395 bp, homo sapiens
  misc_feature (63)..(63): n=unknown
  misc_feature (222)..(376): n=unknown
atattaaaatttaaacaatttcattgtacagtacttgacaatacatttcaacaaactgaaggncaaaccagtaaatcagttttgcttactttctaagcttaataatgtacagactcttgctcttcaagaagatgcaaaaatcagcaacagtacaagtgaaatatttaaataggaatctgaaacaaaacgaattcaatctgatcaaatccacaattaattgangttttcattttattcaattgtgaataaaatagcaganactgtttcatccaatannccaatgatatnnncntaggnganntganctgcctggcttgtgcaagacaagancagttaccttctgctgaaaggatgtgagttttcaaatttgctcganccgaattccgagcttacgt

SEQ ID NO: 2342 - DNA, 516 bp, homo sapiens
agaggacaagcaggcagcagagaccatggggtccccttcagcctgtccatacagagtgtgcattccctggcaggggctcctgctcacagcctcgcttttaaccttctggaacctgccaaacagtgcccagaccaatattgatgtcgtgccgttcaatgtcgcagaagggaaggaggtccttctagtagtccataatgagtcccagaatctttatggctacaactggtacaaaggggaaagggtgcatgccaactatcgaattataggatatgtaaaaaatataagtcaagaaaatgccccagggcccgcacacaacggtcgagagacaatataccccaatggaaccctgctgatccagaacgtcacccacaatgacgcaggattctataccctacacgttataaaagaaaatcttgtgaatgaagaagtaaccagacaattctacgtattctggagccacccaaggcctccatcaccagcaacaactttcaatccggtggagaacaaagatattgt

SEQ ID NO: 2343 - DNA, 254 bp, homo sapiens
  misc_feature (209)..(209): n=unknown
caaggatttcatgagcatcctcctctaaacgcgtgtcaagacaaaagatgcttcagctttggaaacttgttctcctgtgcggcgtgctcactgggacctcagagtctcttcttgacaatcttggcaatgacctaagcaatgtcgtggataagctggaacctgttcttcacgagggacttgagacagttgacaatactcttaaaggcatncttgagaaactgaaggtcgacctaggagtgcttcagaaatccagt

SEQ ID NO: 2344 - DNA, 517 bp, homo sapiens
  misc_feature (205)..(507): n=unknown
gacaggcgggcggctcagtagcaggtgccgtccacctccgccatgacaacatgtgtagaggctgctgttctgactgtgaggagaaggggtatctgggaaggtccttctggtgggactcaggctttcacgctggttaggtggtggcagcagcttcctggagggagatgctataagggggtggggcaagccactgggaaccaatcancatgcaccacagtggtcctcctcattcgtcctcttcagatgagggtttgcagctgggntttgtgctgaggattatcgncgacctgctgaatgacattcacatccagggagtggatgaagatgcggntcagtggacatatctccttctgcancanggaggatacagtgcntttcancgtgttgatcacgctattcacgaacttgttgatnanntggctgtnttngtccagcaaggaaagtnagatacccngctgggtcacatggcgcatnctcccaggacggcaacangctgntgtntctngnaatcagtttc

SEQ ID NO: 2345 - DNA, 443 bp, homo sapiens
gtcaaaacattaccacctacttaagttggtatcaccagagaccagggaaagcccctaggctcctgatctatgctgcatccaggtcttatgatggggtcccgtcaaggttcactggcagtggatctgggacagatttcagtctcaccatcagcagtctgcaacctgaagactttgcaatttattactgtcaacagggtcacagtaccccatataccttcggccaggggaccaaagtggacatcagacgaactgtggctgcaccatctgtcttcatcttcccgccatctgatgagcagttgaaatctggaactgcctctgttgtgtgcctgctgaataacttctatcccagagaggccaaagtacagtggaaggtggataacgccctccaatcgggtaactccccaggagagtgtcacagagcaggacagcaaggacagcaccta

SEQ ID NO: 2346 - DNA, 598 bp, homo sapiens
  misc_feature (442)..(502): n=unknown
ataattaaagccaaggaggaggaggggggtgaggtgaaagatgagctggaggaccgcaataggggtaggtcccctgtggaaaaagggtcagaggccaaaggatgggagggggtcaggctggaactgaggagcaggtgggggcacttctccctctaacactctcccctgttgaagctctttgtgacgggcgagctcaggccctgatgggtgacttcgcaggcgtagactttgtgtttctcgtagtctgctttgctcagcgtcagggtgctgctgaggctgtaggtgctgtccttgctgtcctgctctgtgacactctcctgggagttacccgattggagggcgttatccaccttccactgtactttggcctctctgggatagaagttattcagcaggcacacaacagaggcagttccagatttcaactgctcatcagatggcnggaagatgaagacagatggtgcagccacagttcgtctgatgtccactttggtcccctggncgaagtatatggggtactgtgaccctgttgacagtaataaattgcaaagtcttcaggttgcagactgctgatggtgaaactgaaatctgtcccaga

SEQ ID NO: 2347 - DNA, 564 bp, homo sapiens
  misc_feature (376)..(556): n=unknown
ggccgacggtggaacgcttcctggatgagaagagcggcagtttcgtgagcgacctcagcagttactgcaacaaggaggtatacaataaggagaatcttttcaacagcctgaactatgatgttgcagccaagaagagaaagaaggacatgctgaatagcaaaaccaaaactcagtatttccaccaagaaaaatggatctatgttcacaaaggaagtactaaagagcgccatggatattgcaccctgggggaagctttcaacagactggacttctcaactgccattctggattccagaagatttaactacgtggtccggctgttggagctgatagcaaagtcacagctcacatccctgagtggcatcgcccaaaagancttcatgaatattttggaaaaagtggtactgaaatccttgaagaccagcaaaacattagactaataagggaactactccagancctctacacatccttatgtacactggtccaaagagtcggcaagtctgtgctggtcgggaacattaacatgtgggtgtatcngattgagacgattctnccactggc

SEQ ID NO: 2348 - DNA, 505 bp, homo sapiens
  misc_feature (422)..(422): n=unknown
ggccaaggaagtcagcttctcagagctcaagaggttctgttttaactgtgaatggtaaaactgagaactatatcctggatactacacctggctcccaagcatctctgatatgtgctgttcaaaaccacaccagagaggaagaactgctctggtaccgagaggaggggagagtggatttgaaatctggaaacaaaatcaattccagctctgtctgtgtctcttccatcagtgaaaatgacaacggaatcagctttacctgcaggctggggagggatcagtccgtgtccgtttcggtggtgctgaatgttacttttcctcctctcctaagtggaaacgacttccaaacagttgaggaaggcagtaatgtgaagttggtttgcaatgtgaaagccaacccccaggctcaaatgatgtggtacaanaacagtagtctcctcgatttagagaaaagccgtcacccaaatccaacagacaagtgagtcttttcagctgtcaatcaccaaag

SEQ ID NO: 2349 - DNA, 457 bp, homo sapiens
attcggctgcctgcctgcccgcctgcttgctctctggctgtgctcctgcttaaagaaatcagtccttcctttccgacttagtcctcgggaagaagtttcagactacaaggtatcattggaacatttcaagatcatcaaatcaaattccacagggattggtgaccaaccagaaggctcagacatctgattgctgacctgtccagacatcatctggtctccctgaacctgaaatcacaccatggatgattttgagcgtcgcagagaacttagaaggcaaaagagggaggagatgcgactcgaagcagaaagaatcgcctaccagaggaatgacgatgatgaagaggaggagcccgggaacggcgccgcgagcccgacaggaacggctgcggcagaagcaggaggaagaatccttggacaggtgaccgaccaggtggaggtgaatgcccagaacagtgtg

SEQ ID NO: 2350 - DNA, 449 bp, homo sapiens
  misc_feature (429)..(429): n=unknown
ccttctcggtagtttcatttctgctgtgtcattttgcattcttctgcttgggagcgacagacttgcatctgttattgttgggtcgaactccttctgccgctccagagcctcctgaaggcgtttttggcgtctttcctcacgccgagccaggcgctccaggaatgcggcctcatcatccccttccacttgagtgtttgtggtggttgtcttggcctcctcgtcaggcacactgttctgggcattcactccacctggtcggtcacctgtcccaaggattcttcctcctgcttctgccgcagccgttcctgtcgggctcggcggcgcgttcccgggctgctcctcttcatcatcgtcattcctctggtaagcgattctttctgcttcgagtcgcatctcctccctcttttgccttctaagttctctgcgagntcaaaatatccatggtgtga

SEQ ID NO: 2351 - DNA, 297 bp, homo sapiens
  misc_feature (289)..(289): n=unknown
ggccattgtcaaagccatgggcaacctgcagatcgactttgccgacccctccagagcggacgacgccaggcagctatttgcactgtcctgcaccgccgaggagcaaggcgtgctccctgatgacctgtccggcgtcatccggaggctctgggctgaccatggtgtgcaggcctgctttggccgctcaagggaataccagctcaacgactcagctgcctactacctgaacgacctggagcgtattgcacagagtgactacatccccacacagcaagatgtgctacggaanccgcgtaa

SEQ ID NO: 2352 - DNA, 251 bp, homo sapiens
  misc_feature (10)..(150): n=unknown
ttccaggaanggnggcgtctcacgccncttgngctttttcctttggggcctccgagcggctggggctnggggactgggcaggncgggcancgnnaanatttggacttgggctggggcaggggctggtgttgggcaaagctgggggtccangctggagaagcaggggcccctccagacgcagccttgggagactcagcatgtgcccccctcccctcatcacagaacaagacaatggttaaaaaccagaacag

SEQ ID NO: 2353 - DNA, 495 bp, homo sapiens
  misc_feature (269)..(281): n=unknown
  misc_feature (438)..(438): n=unknown
cagggattgtggccgtactacaaggtttagcatttgctctgctggtcgacattcccccagtctatgggttgtatgcatcctttttcccagccataatctaccttttcttcggcacttccagacacatatccgtgggtccgtttccgattctgagtatgatggtgggactagcagtttcaggagcagtttcaaaagcagtcccagatcgcaatgcaactactttgggattgcctaacaactcgaataattcttcactactggatgacgannngntgangntngcggcggcggcatcagtcacagtgctttctggaatcatccagttggcttttgggattctgcggattggatttgtagtgatatacctgtctgagtccctcatcagtggcttcactactgctgctgctgttcatgttttggttcccaactcaaattcanttttcagttgacagtcccgtcacacactgatccagtttcaatttcaagtactatact

SEQ ID NO: 2354 - DNA, 494 bp, homo sapiens
aaattatgagattcaaaacagtggcgccactatactgctaaacctatgcatgaaggtagtgactaggatggaaatctgtcagtgctacaaaaatatgtatgaacaaaataattttcaccctttgataaagctacaagatataaaatttagaatacttatataatttcatactagatatgtgaaaaatatgccatgctagaaccatcttgttccaaagtttgaaacatattctgtcaaaaatactcttcgtacaatgtatgaacttatcaataactttctgggtataaagttgtttttatgtcatagtcagatgaagatccttctgaattatatgttgattagaattttgtttcaactggcacctcatatacccgattacgtaatcctccatttgtatttatggtaaaatccaatttttccatctttttcctgactgggattaaactttgaagtactgtaatcttccttcatcaaaatatgcaaaacagcatcat

SEQ ID NO: 2355 - DNA, 367 bp, homo sapiens
cacagagcaaggagagaacctgaggattcctcacacatgtagtactcagagctctacggaaacccaggcacctcgacctcaagaggatcagcctggccagggtggcacaactcttccttccccgtgcacagcaggaaagctgccatcagctgagcaagtccaccaacagtttctgtgtcccacttcatctttaataaggacaccatcttcttgtattatacaagaaaggagtgtacctatcacacacagggggaaaaatgctcttttgggtgctaggctcctaatcctctgtggtttctgtggactcgtaaagggaaactaaagattgaagacatcactggtaagtacattttatccctggatgtga

SEQ ID NO: 2356 - DNA, 556 bp, homo sapiens
  misc_feature (27)..(30): n=unknown
acttaacattcacaagttactgtaaangnnggggaccataagcatggggcaggccacggtaaagatcattttgaatgggcaagtctttcaatttcccttacatcacaccaagcaggcaaagcctaaatacagggcaggacttgcctatgtgatgtaccattccagccctccttttcaaagaaaacttgagcagggaccctgggataccaccagcgatggtgggactcccttttgcaatccaaataagcacgatctaaatgagtccaggttggagcagataaggaatggggttgaaaaggagatgtgttcttgaaatcggccaatttcatagcctggaggagacatttgtggttagctgagtcacactgccttgggattagccagctctgctttctgtttcaacaataaaaagtcttgcaaagctgctggcatgtgagacagaggtatccagaaaattttggcatcttttccagcggcataatgagtcttagggaagagacttgttagagcgtggtccatgcactctaccaccggagagaggtccatgttcacatag

SEQ ID NO: 2357 - DNA, 393 bp, homo sapiens
  misc_feature (54)..(68): n=unknown
  misc_feature (348)..(389): n=unknown
gagcatcttcagcgggcgagtccccggctcctccagctccttcctcctcttccntctcctcctccaanctccggcttttgggggatcatgtcctctctcggcagcagaatgagccggcaagtggtccgtccaacaagttccgccactgtttggacagccggccaaggccgaccagtgctatgaagatgtgcgcgtctcaacagaccacctgggacagtggcttctgtgctgtcaaccctaagtttgtggccctgatctgtgaggccagcgggggaggggcttcctggtgctgcccctgggcaagactggacgtgtggacaagaatgcgcccacggtctgtggccacanaagcccctgtgctagacatgcctggtgcccgcacaatgacnacgt

SEQ ID NO: 2358 - DNA, 278 bp, homo sapiens
gccatgtggctgggaatgggaggtgagtggatgggtgtgaatggctgaccctgctggaggccctgcggggctctacttggcctggactgtctcctccagcctgtccaagcgcttctggagctcctgcaccgtggcctggagcttccgcatctcctcctccagccgagacacggcatccgagctgggagtgccactggcctctggtgctgccctcctgcgcccggtgtccaggccccggttgaccctcagctcccggctctttgggggtacgtagccat

SEQ ID NO: 2359 - DNA, 218 bp, homo sapiens
  misc_feature (78)..(93): n=unknown
  misc_feature (212)..(217): n=unknown
gaaatatacaaatgataaatccaagtgtgggaacagcagtaatgaactttaaagaagaagcaaaggcactaggggtgnnncagatnatgnttngattgatgcacattggttttggaattgttttgtgtttaatatccttctcttttagagaagtattaggttttgcctctactgctgttattggtggatacccattctggggtggcctttcntttant

SEQ ID NO: 2360 - DNA, 392 bp, homo sapiens
  misc_feature (33)..(390): n=unknown
acaaatatccatcaataggataaacagcaatanattcttaaaatggaatagtatgcaaaatgaaaatacactactgccacatgcaataatgtacagatcttaaaaaattgagtgaaataagcnanacacaaaatnattcatgntgtctgataaaatatatatttataaaattgnaaacatgcanaaactacgttttgatgttataggctacggaagtgganactcttaggtaagtancaactaactgctttttattacagngtgcaatgagaaatatngttcataaatantntctcttatggagattnatacttanaatcattgtgtatcntgtcnctgcatgtattatataagtatttttaaaaaanaaactatttnagtcagtagganga

SEQ ID NO: 2361 - DNA, 492 bp, homo sapiens
  misc_feature (416)..(416): n=unknown
tctgctcagcctggtgaaccacacaggcccgagtttcacccagtccccactccacggtgcagctgcggcttatctctcagcccagcgagatgccagccttcctgtcccgggccagcgctctgacatgcagaaggtgaccctgggcctgcttgtgttcctggcaggctttcctgtcctggacgccaatgacctagaagataaaaacagtcctttctactatgactggcacagcctccaggttggcgggctcatctgcgctggggttctgtgcgccatgggcatcatcatcgtcatgagtgcaaaatgcaaatgcaagtttggccagaagtccggtcaccatccaggggagatccaactctcatcaccccaggctcagcccaaagctgatgaggacagaccagtgaaattgggtggangaccgttctctgtcccaggtcctgtctctgcacagaacttgaactccaggatggaattcttcctcctctgctggga

SEQ ID NO: 2362 - DNA, 460 bp, homo sapiens
  misc_feature (351)..(437): n=unknown
agaccctcttgcgagaggtgagatgaggccctgccatgcaaaggagtcccagcagaggaggaagaattccatcctggagttcaagtttctgtgcagagacaggacctggggacagagaacggtcctccacccaatttcagctggtctgtcctcatcagctttgggctgagcctggggtgatgagaggtggagtctcccctggatggtgaccggacttctggccaaacttgcatttgcattttgcactcatgacgatgatgatgcccatggcgcacagaaccccagcgcagatgagcccgccaacctggaggctgtgcagtcatagtagaaaggactgtttttatcttctangtcattggcgtcaggacaaggaaacctgcaaggaacacaagcaggcccaggtcaccttctgcatgtcagagcgtggcccgggacangaaggctggcatctcgcttgggc

SEQ ID NO: 2363 - DNA, 522 bp, homo sapiens
  misc_feature (422)..(490): n=unknown
aagaaatccacaaagactcacagtctgctggtgggcagagaagacagaaacgacatgagcacagcaggaaaagtaatcaaatgcaaagcagctgtgctatgggaggtaaagaaacccttttccattgaggatgtggaggttgcacctcctaaggcttatgaagttcgcattaagatggtggctgtaggaatctgtcgcacagatgaccacgtggttagtggcaacctggtgaccccccttcctgtgattttaggccatgaggcagccggcatcgtggagagtgttggagaaggggtgactacagtcaaaccaggtgataaagtcatcccgctctttactcctcagtgtggaaaatgcagagtttgtaaaaacccggagagcaactactgcttgaaaaatgatctaggcaatcctcgggggancctgcaggatggcaccaggaggttcacctgcagggggaagcccattcaccactttccttggcaccagnacttcttcccagtacacggtggtggatgagaa

SEQ ID NO: 2364 - DNA, 359 bp, homo sapiens
  misc_feature (134)..(172): n=unknown
  misc_feature (288)..(359): n=unknown
atatgaaatagaatgtagatattgcaacaatagcatttttggagacagctacctcctttaccaggaataatctttgcatgtcacatttagagataaagctcaaaatgcaaatccttcccctgagagtgggaaancattaacaaatgagagtgggaaaagcattaacaaagcnttaacacaggtctttacatattcaaaatattaaactaatgctaggattatagacttgattttaagacatggtagttaatagaaaagttctagattgaaaacaattttgcaaaaatntacatttgtntatgtgtatatatgtatgtgnanatatanntctactagggaaatatagtgcttaagggtgn

SEQ ID NO: 2365 - DNA, 565 bp, homo sapiens
  misc_feature (499)..(499): n=unknown
gcctccggagccgttgcacacctacctgcccggccgacttacctgtacttgccgccgtcccggctcacctggcggtgcccgaggagtagtcgctggagtccgcgcctccctgggactgcaatgtgccggtcttagctgctgcctgagaggatgtctggggtgtccgagcccctgagccgagtaaagttgggcacattacgccggcctgaaggccctgcagagcccatggtggtggtaccagtagatgtggaaaaggaggacgtgcgtatcctcaaggtctgcttctatagcaacagcttcaatcctgggaagaacttcaaactggtcaaatgcactgtccagacggagatccgggagatcatcacctccatcctgctgagcgggcggatcgggcccaacatccggttggctgagtgctatgggctgaggctgaagcacatgaagtccgatgagatccactggctgcacccacagatgacagtgggtgaagtgcaggacnagtatgagtgtctgcacgttgaagccgatggagtatgacttcaatccgtacttgcagagcttcatg

SEQ ID NO: 2366 - DNA, 435 bp, homo sapiens
  misc_feature (117)..(422): n=unknown
aaatagaaagaagttaaaagaatgtttatgcaaacacatgagaaaagaagggtgcagatgagaatgggggttggggagagaaagaggaggagtaagaaaagagggaaaagcaagggnaagtaaaggaagaaagagaaagaggggcaggaagagagcggatttggcccaaggtcctatcttggccgcanctctctgcnncttccccctgatgcttggtntgttgacaacacagcanccngtgccnggactcccaatnagcttgttcctggactgtgccccaggncctccctcaggagggcacatnctgtcagtccagaccaaactcacattaaataaatttcaatatacactgtacaagaatgccaggcccancccncatctcacnngntncctganccccaaaacaaagctcctccccagcntctctgtgcatca

SEQ ID NO: 2367 - DNA, 488 bp, homo sapiens
  misc_feature (28)..(28): n=unknown
  misc_feature (147)..(184): n=unknown
  misc_feature (349)..(349): n=unknown
gactcagtctccagtctccctgcccgtnacccctggagagccggcctccatctcctgcaggtctagtcagagcctcctccatagtgatgaatacaactatttggattggtacctgcagaagccagggcagtctccacagctcctganctatttgggttctaagcgggcctccggggtccctganaggttcagtggcagcggatcaggcacagattttaccctgaaaatcagcagagtggaggctgaggatgttggggtttattactgcatgcaatctctacaaactccatacacttttggccaggggaccaagctggacatcaaacgaactgtggctgcaccatctgtnttcatcttcccgccatctgatgagcagttgaaatctggaactgctctgttgtgtgcctgctgaataacttctatcccagagaggccaaagtacagtggaaggtggataacgccctccaatcgggtaactcccaggagag

SEQ ID NO: 2368 - DNA, 533 bp, homo sapiens
  misc_feature (431)..(509): n=unknown
aaagatgagctggaggaccgcaataggggtaggtcccctgtggaaaaagggtcagaggccaaaggatgggagggggtcaggctggaactgaggagcaggtgggggcacttctccctctaacactctcccctgttgaagctctttgtgacgggcgagctcaggccctgatgggtgacttcgcaggcgtagagtttgtgtttctcgtagtctgctttgctcagcgtcagggtgctgctgaggctgtaggtgctgtccttgctgtcctgctctgtgacactctcctgggagttacccgattggagggcgttatccaccttccactgtactttggcctctctgggatagaagttattcagcaggcacacaacagaggcagttccagatttcaactgctcatcagatggcgggaagatgaagacagatggtgcaancacagttcgtttgatgtccaacttggtcccctggccaaaagtgtatggagttgtaagaganttcatgcagtaataaancccaacatcctcagcttcaatctg

SEQ ID NO: 2369 - DNA, 496 bp, homo sapiens
  misc_feature (446)..(486): n=unknown
ggcctatggccatgagatacccctgaggaacgggaccctgggtggctcctttgtctcccccagccccctctccaccagcagccccatcctcagtgctgacagcacttcagtggggagtttcccgtcgggagagagcagtgaccagggtccccggacgcccacccagcctctgttggagtctggcttccgctcaggcagcctgggacagcccagcccgtctgcccagagaaactaccagagctcttctcctctcccgactgtgggcagtagctacagcagccccgactactcacttcagcatttcagctcctctccggaaagccaggctcgagctcagttcagtgtggctggcgtccacacggtgcctgggagccctcaggcggccacagaacagtgggcacaacactcccctagtctggttcgcggcgggcatcaatccagcatgntgccccagagtccagttgagcatacagatgtggtcacagnatgcttcatg

SEQ ID NO: 2370 - DNA, 269 bp, homo sapiens
aaaattcagtaaatatggtaatataggaacaaacttaggctcataagccttttaactttttacataatctttaatgatgttgatcaggaaattctttcattggtggaattacttctccagtctccagaattgtatcaccagggaatattctggacttcttttcaactatgccatatggtttttcagaaacatgatacttcatgtaataatgaataatccagacaggtacaagtacatgagtgaaaacaaagatactctttttgtatacc

SEQ ID NO: 2371 - DNA, 567 bp, homo sapiens
caaaaattggctaggcatttcaaatgtgatacaataaaatattaacacaaaagtaatttctatttataaaatttaaaatggcaggttttctgtgtgacgtttgagtttgagatgatttgactggcatgaggcccatcattgggaggtaaaaattacagcacaaagaaaactaagcaggtgcatatgaggtattgtctctttatgctcatcaaaaaataatctccaaaagaaaagttaaaaaaattattgttataaattgcatgaaatacatagtgggctcgattcatagcccccgtccgtatctatatctctatatctatagagacataacttctttcttcgtaagttatgtatgtctacttctacctgtgttatcataataaaggtgtcatgatgatacaggtggaggtagaaatatataacttatctcttcataagggctaaaatgagaactaaaagtaatgagaattcagttgaatatgattaattatcaggatatgttaattagttctcttgatgcttactgtggatggcaaagtatgtgacgtattttaaacattttataat

SEQ ID NO: 2372 - DNA, 518 bp, homo sapiens
  misc_feature (378)..(378): n=unknown
atatttctctgttgttgccaggttaccttctgcttttaaattgccatcttgtaaagtgtatgtggttcttaagtgccagggagatcagccttgcccatgaaggttgcatatgtgtggtatatagtttttacctgaaagcctgagctttctcttattcctaaagtggtggcaaaagaatgaactgggtatgaccctgcccccttactgggcttggatattgaggaccagacgctgccaaatctaggacaagacagaccatcaaagcagacttttgtgggctcctctttggggtgaccactgctttcaaagccatctgccaaggctctccagggcaggacctgactggtggggaatgagtgttcagaagccttgggagangccaaagagccattctagcatgatctgagaaaaccttcctgcagaggccagaaaccttgagcttaggtgcctggggaccagctttcgacattctctccagtttctgattctaatttttgccacgtgtcacaacttttcca

SEQ ID NO: 2373 - DNA, 352 bp, homo sapiens
  misc_feature (4)..(6): n=unknown
  misc_feature (322)..(322): n=unknown
attngnttctgttcatcagcaaaaagctttattggctccaacaaattatcccttttaaaactcctcttcttcttctggtctcagtggaacaacacatttgaatttcagatttgcagtttatagcattttttttccctaagaaccatataaatacatgcaaaaccttgtacatagagcttaaataatatcaaaatgcaaatatagattgggtgcactgttaagccgaattgcaaattatggcaacacacactggactgggggaaacggtgctttgataacaccatttgtttgtttatgtcatgcagaccacaatagtcaatcntttggttttcttttttggacaaaaatacca

SEQ ID NO: 2374 - DNA, 351 bp, homo sapiens
ccgaccggagccagccggtctgtgaggcatgtcacgctgggtcccggtcaaagtccactgtccagagaagtcatcttcctaggccctgcccctgcctgtccagaggcatggggctcgccagaacctggcccagcagagtcttctgcagatatggacggatcagggaggcacagcacatttggctgcagacaatttcatgctgaaaaggagattatttttcagggccccatttctgctgcagggaaggttggtgattattttgcaacagaagagtcagtgggtacccagacttctgtcaggcaactccagttaggccctaaagaagggttcagtgggcaaatccagttcaca

SEQ ID NO: 2375 - DNA, 457 bp, homo sapiens
  misc_feature (410)..(410): n=unknown
tgtagggaacaggagtttagcaaaatcagcttcttagatgatgtcattctaaatatacatcttaaacaaacaatatcaaaaccaccagtaggaaactgaaaaacactcagtgagtactgttttgtctcagtaacaataaatacaaaaagactggttgtgttccggccccatccaaccacgaagttgatttctcttgtgtgcagagtgactgattttaaaggacatggagcttgtcacaatgtcacaatgtcacagtgtgaagggcacactcactcccgcgtgattcacatttagcaaccaacaatagctcatgagtccatacttgtaaatacttttggcagaatacttcttgaaacttgcagatgataattaaggttccaagatatttcccaaagtaaatagaagtgggncataatattaattacctgttcacatcagcttccattttacaagtcat

SEQ ID NO: 2376 - DNA, 400 bp, homo sapiens
  misc_feature (65)..(171): n=unknown
taggaacacagtccacattcaagttgaggaacagtggatctttaagagctgacctttggggtganctgggaaaagggggaagatggctaagcatggagagaaacgaggcaagagacaagctatgattacaacaccgntttcagccccctggccctcaatagcacacaancnacatatcagctttctgaagagaaggaactactgtttagtgctcctcactttgcaatgttgtgctacgccagaatttctccagtttttttcattatcatccccctgagaaaaaaattacattgaatttaaattttccctaataagagaaattaaatatgaaagaataggatttgttgggtaagattgagctttggaaggtcacgaaccattattctatctaaggtgtgtg

SEQ ID NO: 2377 - DNA, 223 bp, homo sapiens
  misc_feature (185)..(185): n=unknown
ttacaaaaatatgccaccgtctggtacaaacaactataaaaaatcagttcatcatgcaagaaaagtgtgcaaataatttatacagaaggactcagctcacacaatattaaataaacatctctgcatgtaattggtctaactttatgctttagttacaatgttcaaccccctctaatacttttcanttaaaaaagtacattaaagcttctaagcttaggacaca

SEQ ID NO: 2378 - DNA, 421 bp, homo sapiens
atggagatgaccaccatcagctccaggcttctatcctgctaacccagtaacccagtgggaagagatttacttattccaataattccaagtggagagtgtcattgacccgtttggggtctcatctctacttctaggggaatgaaacactctgagtggccaggcctgtgtcatgtgctaattcctagagccagggaaataaggtctgaggattcaggatggggtgaaaggtggttgcttaaaggaaaatgaaatacaattagcagaataaggggaaacgagtggtctgctctgctcgggcaaaacaagagatgcccattactgtgagggacccttgaagtctggactcttaaatgggtttttgctgatttcctgggtgcatgctaggatgatggggcttgatgcagtagggaagagacgatgt

SEQ ID NO: 2379 - DNA, 393 bp, homo sapiens
ctactgcatcaagccccatcatcctagcatgcacccaggaaatcagcaaaaacccatttaagagtccagacttcaagggtccctcacagtaatgggcatctcttgttttgcccgagcagagcagaccactcgtttccccttattctgctaattgtatttcattttcctttaagcaaccacctttcaccccatcctgaatcctcagaccttatttccctggctctaggaattagcacatgacacaggcctggccactcagagtgtttcattcccctagaagtagagatgagaccccaaacgggtcaatgacactctccacttggaattattggaataagtaaatctcttcccactgggttactgggttagcaggatagaagcctggagctgatg

SEQ ID NO: 2380 - DNA, 159 bp, homo sapiens
cgacgccggcgtgatgtggcttccgctggtgctgctcctggctgtgctgctgctggccgtcctctgcaaagtttacttgggactattctctggcagctccccgaatcctttctccgaagatgtcaaacggcccccagcgcccctggtaactgacaagga

SEQ ID NO: 2381 - DNA, 478 bp, homo sapiens
acacgaactacaaagagacctttcgtatgtctgataccaaagacataactgaaaagtcatttttccaaaccttgagcttgcattcacctacctgtctaaccctcacatgtgctaattaactgcaaatgccatttctgggcttcacacacattccgtggctttcccttttctgatgtgacttccctcccttaccccacacctccctgcactgtcccctgctgtgcccttggctggaatgccctgcagcctgcttcagcccagcaaagtattcatcttaccagtccatgccctgactcctgatgtcacccttccctgcatcacccttccctgtgtatttggtggataaggcttgattgaggctcaggtactgagtccctgctggcacattgagaaccagctgccaccccgatgataaggaagacagacccgggacttccatatgaattggatatgatcatctgacatgcaccctactaac

SEQ ID NO: 2382 - DNA, 514 bp, homo sapiens
  misc_feature (81)..(81): n=unknown
  misc_feature (386)..(386): n=unknown
agcctccaccctggcgatggctccctggtcctactttctctctcaaactggctttttctcattcctttgactccgccaganttcctcgcccccatgacctggtgttgtgtctgatcaccccaacattcctggctgcccaatgtggggcaatgaagaccccagtgaaggaatgctagagtgtgtgaaagtggaggacgcatcgtcaaaggacacctgaggacgtctcaaagaagctcggcgggagagctgagcgctcggaagaaccaagaatcatctcttttgaaaaatcgattcatcaaatgaatcttcagccaacaactgttcaagaaggattcaaatatcacaggttccgagaagtaaagctttggaggtcacaaaattagcantagaagctgggttccgccatatagattctgctgacgcatacaataatgaggagcaggttggactggccatccgaagcaagattgcagatggcagtgtgaagagagaagacatattctacacttcaaag

SEQ ID NO: 2383 - DNA, 525 bp, homo sapiens
atttgtggccacttgcatctggttcttcccaatatagtgttgcaaaggtgactggtgggttcgaattgtttagccacatagtaatattatttagtctttcctcaaatgacactgaagagttgtaattcataaaataggaagagatggtatcgtgaatgggtacatcagtaccaggccacatagcagcagcacttgatctgttttcctgaagctgattggtcacccaaataggtactgcctcattccaccaaaaaggatccttgtcattagagtcagaaaagtgtttctttgtgactgcatcatacatggaattagccacaatgccatggctttcttcatacaagcctgtcacaatactgtagtggtttggaaatgtttttgtgataaaaacatttttaacatgctctaccaaaacaccttctttgataaaattctggagatgaggaaattcatagttcttcagataatcagctctgaagccatcaaaggatactagtagtaacttaggtggcaaactagagggaa

SEQ ID NO: 2384 - DNA, 358 bp, homo sapiens
cgtccttctcttcgaaacatcacttcaggtcagatcccgagacgaccacattccttcaaagagtcagatgactaagggatggaggataaattcgtctcaagggacaaccaagcactacccatttaactgaggcatctcaattgccagattttctctgcatcggtcaggtcaatcaaattaacagcgacaagacatctttcttaaggggacagtaattgggtcaacactgtggatcaccctcggccaagggacacgactggagattaaacctaagaactgtggctgcaccatctgtcttcatcttcccgccatctgatgagcagttgaaatctggaactgcctctgttgtgtgcctgct

SEQ ID NO: 2385 - DNA, 251 bp, homo sapiens
  misc_feature (31)..(31): n=unknown
cctccaacattagcataattaaagccaaggnggaggaggggggtgaggtgaaagatgagctggaggaccgcaataggggtaggtcccctgtggaaaaaagggtcagaggccaaaggatgggagggggtcaggctggaactgaggagcaggtgggggcacttctccctctaacactctcccctgttgaagctctttgtgacgggcgagctcaggccctgatgggtgacttcgcaggcgtagactttgtgttt

SEQ ID NO: 2386 - DNA, 531 bp, homo sapiens
  misc_feature (403)..(405): n=unknown
ggcaggctccaggaaagggcctggagtgggtctcagggatcacttggaatagcggtaatatagtctatgcggactctgtgaggggccgattcaccgtctccagagacaacgccaagaactccctacatgtgcacatggacaatctgagacctgacgacacggccttttattactgtgcaaaagaggtcatcccctactgtagtaccaccagctgcttatatatgagggcttttgatatctggggccaagggacaatggtcaccgtctcatcagcatccccgaccagccccaaggtcttcccgctgagcctctgcagcacccagccagatgggaacgtggtcatcgcctgcctggtccagggcttcttcccccaggagccactcagtgtgacctggagcgaaangnacagggcgtgaccgccagaaacttcccacccagccaggatgctccggggacctgtacaccacgagcagccagctgaccctgccggccacacagtgcctagccggcaagttcgtgacatgccacgtg

SEQ ID NO: 2387 - DNA, 421 bp, homo sapiens
ggcctggactcctcttcttctcttgctcctctctcactgcgcagggtccctctcccagtcggtgctgactcagccaccttcccacgtcgcttcgcctggagattccgtcagactcacctgcacaatgtccagtgacttcgacgtaggctccaattattttttctggcaccaacataagacagggaggcccctctcacatctcctcttttacttctcagactcagatcaggtccggggcccaggagtccccagtcgtttctcggccttcaaggatgtttccgccaacatggcggtcttaatcatctccggagtccagcctgacgatgaggctgactattattgtatgagctggccaaataatgacgtggcggtcggcggcgggaccaacttgcgcgtcttgggtcagcccaagggctgcccc

SEQ ID NO: 2388 - DNA, 539 bp, homo sapiens
  misc_feature (42)..(42): n=unknown
agtgcagggagaagggcttgatgccttggggtgggaggaganacccctcccctgggatcctgcagctctagtctcccgtggtggggggtgagggttgagaacctatgaacattctgtaggggccactgtcttctccacggtgctcccttcatgcgtgacctggcagctgtagcttctgtgggacttccactgctcaggcgtcaggctcagatagctgctggccgcgtacttgttgttgctttgtttggagggtgtggtggtctccactcccgccttgacggggctgctatctgccttccaggccactgtcacggctcccgggtagaagtcacttatgagacacaccagtgtggccttgttggcttgaagctcctcagaggagggcgggaacagagtgaccgagggggcagccctgggctgacccaagacgcgcaagttggtcccgccgccgaccgccacgtcattatttggccagctcatacaataatagtcagcctcatcgtcaggctggactccggagatgattaagaaccgccatg

SEQ ID NO: 2389 - DNA, 528 bp, homo sapiens
  misc_feature (483)..(515): n=unknown
ctgcagtcccccatagacctgcacagtgacatcctccagtatgacgccagcctcacgcccctcgagttccaaggctacaatctgtctgccaacaagcagtttctcctgaccaacaatggccattcagtgaagctgaacctgccctcggacatgcacatccagggcctccagtctcgctacagtgccacgcagctgcacctgcactgggggaacccgaatgacccgcacggctctgagcacaccgtcagcggacagcacttcgccgccgagctgcacattgtccattataactcagacctttatcctgacgccagcactgccagcaacaagtcagaaggcctcgctgtcctggctgttctcattgagatgggctccttcaatccgtcctatgacaagatcttcagtcaccttcaacatgtaaagtacaaaggccaggaagcattcgtcccgggattcaacattgaaagagctgcttccggaganggaccgctgaatattaccggctaccgggggtncctgaccacaccc

SEQ ID NO: 2390 - DNA, 491 bp, homo sapiens
  misc_feature (448)..(479): n=unknown
cagaagagagaattcttagagtcagagggaggagtagaaggaaaaagatatttaaaaagctatgcttcaagaggacatttcatgctgtcaaaatgagactgtgaatcagaaagttctcggggaactgcaaggtgctctcaactaggggtcggttccttctcagtcatggcactgactcatctccacagggttctcacctgcgggaggaaaatggaggagttgcgcctgtcagaaactgtctgtgtgattcggggaagaatatggagtatcttagtagcattccattattacttgcccctaaatacatgatgccagccccctgcacagataacctcctgcttttatagcttgaaatatatttgatctaaaccacgatttgacatcttcagagagagagaagtagataaaagtctccattccaggttggcagtacggatccctgcagaantggctncaaatnaaatttggcctacagagantaagttctacag

SEQ ID NO: 2391 - DNA, 282 bp, homo sapiens
  misc_feature (187)..(269): n=unknown
ccagtctccatcctccctggctgcatctgtaggagacagagtcaacgtcactggccggtgcatccaatttgcaatctggagtcccatctcggttcagtggcagtggatctgcgacagatttcgctctgactatcagcagcctgcagcctgaagatgttacagtttattacgttcaacggagttacancttagaaaactgaccaaacagacgantcattgggtttgagaggagaattggcttcaagggggagntgggnaagaancaggtngatttttccctgc

SEQ ID NO: 2392 - DNA, 401 bp, homo sapiens
  misc_feature (32)..(32): n=unknown
aaagatgagctggaggaccgcaataggggtangtcccctgtggaaaaagggtcagaggccaaaggatgggagggggtcaggctggaactgaggagcaggtgggggcacttctccctctaacactctcccctgttgaagctctttgtgacgggcgagctcaggccctgatgggtgacttcgcaggcgtagactttgtgtttctcgtagtctgctttgctcagcgtcagggtgctgctgaggctgtaggtgctgtccttgctgtcctgctctgtgacactctcctgggagttacccgattggagggcgttatccaccttccactgtactttggcctctctgggatagaagttattcagcaggcacacaacagaggcagttccagatttcaactgctcatcaga

SEQ ID NO: 2393 - DNA, 291 bp, homo sapiens
  misc_feature (179)..(249): n=unknown
ctccttcagtagcactacttaccattggggctggatccgccagcccccagggaaggggctggagtggattgggagtatcaattatattggggacacctactacagtccgtccctcaagagtcgagtcaccatatccgtggacacgtccaagaaccagattttcctgaagttgagctctntgaccgccgcagacacggctgtgtatttctgtgcggggacgtcatcatttacggcgggggggtactactngggccagggaacctggtcaccgtctcctcagcatccccgacc

SEQ ID NO: 2394 - DNA, 444 bp, homo sapiens
  misc_feature (442)..(442): n=unknown
tcagtagcaggtgccgtccacctccgccatgacaacagacacattgacatgggtgggtttacccgccaagcggtcgatggtcttctgtgtgaaggccagcggcagggcctcgtggcccaccatgcaggagaaggtgtcccccttcttccagtcctcggctgccacgcgcagtatgctggtcacagcgaaggtggtggtgccctggctgggctcctgccgggatgcccaagtcaggtacttctcgcggggcagctcctgtgacccctgcagccagcgaaccagcacgtccttggggctgaagccgcgtgccaggcacgtcagcgtcaccagctcgttcagggccagctcctccgacggcggcggcaacaggtggacctcgggccggaatgtgtttccggattttgagagggtggcggttagcggggtcttggactcggggtangc

SEQ ID NO: 2395 - DNA, 374 bp, homo sapiens
  misc_feature (273)..(364): n=unknown
gtcacattcttcgcagactccgtggagggccggttcaccatctccagagacaattccaagaacacaatgtatctccaaatggacagcctgagagccgacgacacggccgtatattactgtgtgaaagccccttgggatattggtgaagcagcgggtaaaaccgtcttcatctactggtacttcgatctctggggccgtggcaccctggtcactgtctcctcagcatccccgaccagccccaaggtcttcccgctgagcctctgcagcacccanccagatgggaacgtggtcatcgcctgcctggtccagggcttcttcccccaggagccactcagtgtgacctggagcgaaangggaccagggncgtgaccgcc

SEQ ID NO: 2396 - DNA, 510 bp, homo sapiens
  misc_feature (505)..(505): n=unknown
gggcggctcagtagcaggtgccgtccacctccgccatgacaacagacacattgacatgggtgggtttacccgccaagcggtcgatggtcttctgtgtgaaggccagcggcagggcctcgtggcccaccatgcaggagaaggtgtcccccttcttccagtcctcggctgccacgcgcagtatgctggtcacagcgaaggtggtggtgccctggctgggctcctgccgggatgcccaagtcaggtacttctcgcggggcagctcctgtgacccctgcagccagcgaaccagcacgtccttggggctgaagccgcgtgccaggcacgtcagcgtcaccagctcgttcagggccagctcctccgacggcggcggcagcaggtggacctcgggccggaatgtgtttccggattttgagagggtggcggttagcggggtcttggactcggggtaggcagcagtgcaagtgaaggtcttcccatggttccatggctcggcacagcccggcangacac

SEQ ID NO: 2397 - DNA, 356 bp, homo sapiens
  misc_feature (81)..(81): n=unknown
gggtacgtgagcaggaaacatggagaagaatcctttggcagccccattactaatcctctggtttcatcttgactgcgtganagcatactgaacgtggaacaaagtcctcagtcactgcatgttcaggagggagacagcaccaatttcacctgcagcttcccttccagcaatttttatgccttacactggtacagatgggaaactgcaaaaagccccgaggccttgtttgtaatgactttaaatggggatgaaaagaagaaaggacgaataagtgccactcttaataccaaggagggttacagctatttgtacatcaaaaggatccccagcctgaagactccagccacattacctct

SEQ ID NO: 2398 - DNA, 306 bp, homo sapiens
acgcccagatacacagcatagcagggcctcgataatgagataatttccccccacgtcttgagaagaagaatactatgtatttctttatgaacactattaaaaaaaaataaacccctcacaacattctgcaggacctagagcccaagagaacccactgaagatccatcatctgtgggatggcggaggcagtctctggggagcaggagggaatgtgcacagccaggggaggctgcagcagccttgcctctgccgtgaatgtcaggcagtgacaagcagcaataagggaacagagggggtggcagcagt

SEQ ID NO: 2399 - DNA, 443 bp, homo sapiens
gctacaggcacccacgccgaggtccagctggttcagtctggggctgaggtggagaggcctggggctacaatgaaaatctcctgcgaggtttctggatacaccatcaccgactactacatgcactgggtgcgacaggcccctggacaagggcttgagtggatgggacttgtcgatcctgaagatggtgaaacaatctacgcagagaagttccagggcagagtcaccatatccgcggacacgtctacagacacaggccacatggagctgaggagcctcagatctgcggacacggccgtttattactgtgcaatttcgacggtggtgataattctgctcgccttgagttctggggccggggaacctggtcaccgtctcctcagcatccccgaccagccccaaggtcttcccgctgagctctgcagcacccagccagatggggaacg

SEQ ID NO: 2400 - DNA, 320 bp, homo sapiens
gacaggcgggcggctcagtagcaggtgccgtccacctccgccatgacaacagacacattgacatgggtgggtttacccgccaagcggtcgatggtcttctgtgtgaaggccagcggcagggcctcgtggcccaccatgcaggagaaggtgtcccccttcttccagtcctcggctgccacgcgcagtatgctggtcacagcgaaggtggtggtgccctggctgggctcctgccgggatgcccaagtcaggtacttctcgcggggcagctcctgtgaccctgcagccagcggaaccagcacgtctttggggctgaagccgcg

SEQ ID NO: 2401 - DNA, 301 bp, homo sapiens
tcaactgcaagtccagccagagtgttttatacagctccaacaataagaactacttagcttggtaccagcagataccaggacagcctcctaaactgctcatttactgggcatctacccggaaatccggggtccctgaccgattcagtggcagcgggtctgggacagatttcactctcaccatcagcagcctgcaggctgaagatgtggcagtttattactgtcagcaatattatagtgctccgtacacttttggccaggggaccaagctggagatcaaacgaactgtggctgcaccatctgt

SEQ ID NO: 2402 - DNA, 318 bp, homo sapiens
  misc_feature (174)..(318): n=unknown
aaagatgagctggaggaccgcaataggggtaggtcccctgtggaaaaagggtcagaggccaaaggatgggagggggtcaggctggaactgaggagcaggtgggggcacttctccctctaacactctcccctgttgaagctctttgtgacgggcgagctcaggccctgatgggtnacttcgcaggcgtagactttgtgtttctcgtantctgctttgctcancntcagggtgctgctgaggctgtaagtnctgtccnnnctgtcctgctctgtgacactntcctgggagttacccgattcgangncttnatncancntn

SEQ ID NO: 2403 - DNA, 506 bp, homo sapiens
  misc_feature (303)..(303): n=unknown
cagagctctgggaatctcaccatggcctggacccctctcctgctccccctcctcactttctgcacagtctctgaggcctcctatgagctgacacagccaccctcggtgtccgtgtccccaggacaaacggccaatatcacctgctctggagacgcattgccaaataaatatgcatattggttccagcagaagtcagggcaggcccctttgctggtcatctatgaggacattagacgacattccgggatccctgagagattttctgggtccagctcagggacaatggccacattgaccatcagnggggcccaggtggacgatgaagctgtctactattgttactcaacagacaacagtggaaattacaaaaggctgttcggcggagggaccaggctgaccgtcctaggccagcccagggctgccccctcggtcactctgttcccgccctcctctgaggagttcaagccaacagggccacactggtgtgtctcaataagtgacttcta

SEQ ID NO: 2404 - DNA, 505 bp, homo sapiens
aagggcttgatgccttggggtgggaggagagacccctcccctgggatcctgcagctctaggctcccgtggggggggtgagggtttagaacctatgaacattctgtaggggccactgtcttctccacggtgctcccttcatgcgtgaactggcagctgtagtttctgtgggacttccactgctcaggcgtcaggctcagatagctgctggccgcgtacttgttgttgctttgtttggagggtgtggtggtctccactcccgccttgacggggctgctatctgccttccaggccactgtcacggctcccgggtagaagtcacttatgagacacaccagtgtggccctgttggcttgaagctcctcagaggagggcgggaacagagtgaccgagggggcagccctgggctggcctaggacggtcagcctggtccctccgccgaacagccttttgtaacttccactgttgtctgttgagtaacaatagtagacagcttcatcgtccacc

SEQ ID NO: 2405 - DNA, 224 bp, homo sapiens
gtagtagtaggaatacttactatgaagattctgtgaagggccgattcaccatctccagagacagtgccaagaattccctgtatttggaaatgaacaatctaagagacgaagacgcgggtgtttattactgtgcgagagggttcggaggcgcctacaatctttggggccaagggacagtggtcaccgtctcttcagcatccccgaccagccccaaggtcttcccg

SEQ ID NO: 2406 - DNA, 304 bp, homo sapiens
ctcgtgccgcttcattgggattggagaacttctgtggggccagttcatctccgcaatacctacccgatccctgaagttcctgaaggaggctgggcatggcaccaccaaagaggagatcaccaaggatgccgagggactggatgagattgaccatgctgagatggagctgcgccgaggccggatcctctggttccgggggcctgaaccgtatccagactcagatcgacgtaattaacacattccagacgggagcctcttttaaggggagtcctaaggcgacagaacatgggtcaacaccttgatg

SEQ ID NO: 2407 - DNA, 505 bp, homo sapiens
  misc_feature (372)..(422): n=unknown
ttacaaaaataaaatacaagggcacacagtctggttttagagtaggatttttgtctttttcttcccttaagtcaaaatatcaaagggaaaaaccaaaaggaaaagataaccatggttggttaaagtggatgccacgtgctctcttgtggtcattttagcaaatcatgcatcataatagactatcactcactgcccataggaggagatgaaacagcaggaacagaagtggtggggaaagatttgactggtgcaactgctacataggatgaactaggaacaagttttacatcaaggtgttgacccatgttctgtcgccttaggactcccttaaaagaggctcccgtctggaatgtgttaattacgtcgatctgnttctggatacggttcaggccccggaaccagaggatctggcctcggcgcantccatctcagcatgggcaatctcatccagtccctcggcatccttggtgatctcctctttggtggtgccatgcccagctccttc

SEQ ID NO: 2408 - DNA, 374 bp, homo sapiens
  misc_feature (2)..(18): n=unknown
  misc_feature (181)..(335): n=unknown
anaatangntgnngnggnaaaatgggagggccatccatttctctttctgaacctctaatgttagaagaaccagagaaagaagaaatagaaacttccctacccatagctattacccctgaacctgaagattctaatttagtagaagaagagatcgtagaacttgattacccagaaagcccannggtttccgagaagcccttcccaccacatatgtcccctgaagtggagcacaaagangaagagcttattctaccattattggcagcatcatctcctgaacatgttgctttgtctgaggaagaaagagaggaaattgcatctgttctactggttnngcttttgtatcagagtatttcagtaccacaggatttgaa

SEQ ID NO: 2409 - DNA, 434 bp, homo sapiens
tctgtaagaggagccagctggataagatgatttctgaagacgcttccatggtgggcactgaggcacagaggaggccaaggagaggttgtttgttcatgcatgcattcatccgtgacacatgagtacctactgaggactccataaacagaacgggatacagagataaacaatttgggttctgtccacgtttgtcaaaaggtggtgctggcccacctctgaaagcagaacacttgctcaacaaccttgctgttggcccaagtctaacacattctttatgactgtgagcatctcagagtgagagaaaaatgtagaaagttttttaaattctaaacaggatttagtgtctttagttatcttgctggatgggaaagggatgttgtcatttctgggcacaaatgaaaagtaggacggaaagctcctttcattcagtttat

SEQ ID NO: 2410 - DNA, 404 bp, homo sapiens
gggtcctaaaatgggtacctgctacccaagtgatgagctactgcctttgtttgttaactgctctttcctccctcagcctctagccttctcctttcatccagcggtgctagagacctggtgttgatatccacattcataggctctgagtgatctggcatttttaagatggcaaagcacttttgcatcctgtgggctgttgtctgtagttctggcatattgcatgcctgaaggcagagctagcactgctacctccaatacagatgagaaaactgagacccagagagattaatggtaaggttacacagcaaattagaaggagtgtaggactaagacctaggcttcccaaactcccggtccaaactcctgggtgggtcaaaggggtgcaaggtaagattgcagaggat

SEQ ID NO: 2411 - DNA, 401 bp, homo sapiens
  misc_feature (385)..(397): n=unknown
gccaggaataactagagaggaacaatggggttattcagaggttttgttttcctcttagttctgtgcctgctgcaccagtcaaatacttccttcattaagctgaataataatggctttgaagatattgtcattgttatagatcctagtgtgccagaagatgaaaaaataattgaacaaatagaggatatggtgactacagcttctacgtacctgtttgaagccacagaaaaaagattttttttcaaaaatgtatctatattaattcctgagaattggaaggaaaatcctcagtacaaaaggccaaaacatgaaaaccataaacatgctgatgttatagttgcaccacctacactcccaggtagagatggaccatacaccaagcagntcacaggatgtngaga

SEQ ID NO: 2412 - DNA, 334 bp, homo sapiens
  misc_feature (149)..(149): n=unknown
  misc_feature (265)..(331): n=unknown
tactcagatagatgattttaatttcttgatgcaatttgaaatatcatttcagaaaactgttgcatcaaataatatacaaccaggtatcagtatgaaaaaggatctttgttcatcactatttcttacaaataaaataacaaataaatganactattaaattttaatcttgacagtttttacatatccatgagtgtttttatttaatcaaagtatccttttccgacatcttaaaattatttttatgagtttatgatcacacatgggntgaattttaagattcagaaatatccttnacntacattgtntngtttttaaaaactctcttctaggncta

SEQ ID NO: 2413 - DNA, 358 bp, homo sapiens
tgtttctatactgcaaatggccatgttgggtatatgtctatatacgccttacttagacattgtattgtatataaccgtgtgtagaactatagacaatagtcaccaaatagttatttaaatattaattttctttattaatacaacacatttaataagtatctacctatgccaggcactgtgctaagttctattactaaataaaatttggtccctgtccgaagatgcttgtgaccattgaaaattaggaaaatgaatgccctcagtcagatcaaaagtcaacagctggatttattattagtacttaccaagtaggcacaaatcattgcatttacagacttcaccaaatctttgtagggta

SEQ ID NO: 2414 - DNA, 446 bp, homo sapiens
tcttggtgccttttgtgtgatgcgccttgctgatggcttgacatgtgcaattgtgagggacatgctcacctctagccttaaggggggcagggagtgatgatttgggggaggctttgggagcaaaataaggaagagggctgagctgagcttcggttctccagaatgtaagaaaacaaaatctaaaacaaaatctgaactctcaaaagtctatttttttaactgaaaatgtaaatttataaatatattcaggagttggaatgttgtagttacctactgagtaggcggcgatttttgtatgttatgaacatgcagttcattattttgtggttctattttactttgtacttgtgtttgcttaaacaaagtgactgtttggcttataaacacattgaatgcgctttattgcccatgggatatgtggtgtatatccttccaaaaaattaaaa

SEQ ID NO: 2415 - DNA, 530 bp, homo sapiens
  misc_feature (454)..(486): n=unknown
atgggtcagtggtcaacagctgaatcagagtcctcaatctatgtttatccaggaaggagaagatgtctccatgaactgcacttcttcaagcatatttaacacctggctatggtacaagcaggaccctggggaaggtcctgtcctcttgatagccttatataaggctggtgaattgacctcaaatggaagactgactgctcagtttggtataaccagaaaggacagcttcctgaatatctcagcatccatacctagtgatgtaggcatctacttctgtgctggtcggactacctcaggaacctacaaatacatctttggaacaggcaccaggctgaaggttttagcaaatatccagaaccctgaccctgccgtgtaccagctgagagactctaaatccagtgacaagtctgtctgcctattcaccggattttgattctcaaacaaatgtgtcacnaagtaaggattctgatgtgtatatcacagacnaaactgtgctagacatgaggctatggacttcaagagcaacagtg

SEQ ID NO: 2416 - DNA, 382 bp, homo sapiens
tacaacacgcccagacacacagcatagcagggcctcgataatgagataatttccccccacgtcttgagaagaagaatactatgtatttctttatgaacactattaaaaaaaaataaacccctcacaacattctccaggacctagagcccaagagaacccactgaagatccatcatctgtgggatggcggaggcagtctctggggagcaggagggaatgtgcacagccaggggaggctgcagcagccttgcctctgccgtgaatgtcaggcagtgacaagcagcaataagggaacagagggggtggcagcagtgtttggcagctcttcagcaatcttaatcataaattcgggtaggattcagttggtgcattgccgggggggc

SEQ ID NO: 2417 - DNA, 498 bp, homo sapiens
  misc_feature (438)..(472): n=unknown
gggaaaacataaataacagtacatgtaaaccaatattttgtcccttcttttgttcaacagctatttctcaggcacctgctgggtgtcagcagctgtgctcagtgtggtgaccaaaacccttgtcaacaaggcagcaaggttctaacctggttagggcttacagttgagtagctgaaattttgatttcttttctgtgcccctagtaaagatatgatagcaaacaataagagctattttttttattgtgttcttactctgtgttgggccctgttctcagtggtttatagcctattaactcagtctctttaccaccactctgaggggaggctctgtcatacccacttgacagatcgggaagtggaagcatcaggaggttaagcaacttgttaaagatcacaaaatccataatgacagagttttgattagaatcccagcagnctgtctccagaactggcctattaagtgcagtgcnactgtactggctttcataatatgtat

SEQ ID NO: 2418 - DNA, 549 bp, homo sapiens
  misc_feature (501)..(547): n=unknown
gtccacgccatctaaagctactgtgtacagtaatcaggactggagaagggacgatttagtatctaaaaacaacaaaaaaaacactgggacatgccccctgaattgcaagttggagttcgtaagaatctacttgctggcaagccggtttcctccctgagaagcacacttcccgcttccttctctccttccagcgtcttctgtccctctcagttaaggcctggacagtgtgggatggtgttgcaatctctcctgcagagctgtcagtcgcccgtgggctcgggctgcgtgcactcaggctcccggtcgctgggctctgcgctccgccgccgcagctcctccaccgtctgcagcagggccgaccgctccagttctaaggtaagcatggcctgcttcagcttgctctcactgctcaggagcttctcaatggtggcctcaaggctttggatcctaccatttgccacctgcaactgttcaaggaggtcaaggttctgtttgcgtaantgctgttggttttctctaatttatccattcttggtgtcactgaganga

SEQ ID NO: 2419 - DNA, 508 bp, homo sapiens
  misc_feature (406)..(472): n=unknown
gacagactgagacagagaccggcgggaactctgccagggtcttgcacggcccccaacctctgccatgcgtggccagccctcctggggtttgcccaggccattttgggactggaacaagagaagaacaacccgcccccgtccccaccccaggccctggtccagctcccagggacaccacagctttcctctctgggcctctctgaaggaggtgtggggaggttggattgggtttgggaggcaaaagcacctccaaggccctgctgtgcctttagactggacgtgtggacaagaatgcgcccacggtctgtggccacacagcccctgtgctagacatcgcctggtgcccgcacaatgacaacgtcattgccagtggtccgaggactgcacagtcatggtgtgggagatnccggatgggggctgatgtgcccctgcgggaacccgtcgtcacctggaagggcacaccaagcgtgtnggcattgtggctggcacaccacagccagaacgtgtg

SEQ ID NO: 2420 - DNA, 506 bp, homo sapiens
  misc_feature (340)..(388): n=unknown
  misc_feature (501)..(501): n=unknown
tgccatgtggctgggaatgggaggtgagtggatgggtgtgaatggctgaccctgctggaggccctgcggggctctacttggcctggactgtctcctccagcctgtccaagcgcttctggagctcctgcaccgtggcctggagcttccgcatctcctcctccagccgagacacggcatccgagctgggagtgccactggcctctggtgctgccctcctgcgcccggtgtccaggccccggttgaccctcagctcccggctctttgggggtacgtagccatccttgagggagatgaggaggggcccagcatcccgaccccccagccactcctcagccgtganggcagggtcgggccctgcggtgggtgggtacaggtcctcctggaatangtccgactttcgaggcactgtcatggcaatgggctcacacctccgctcgtgcagcttgtagaacctggcgatctcacacttgttcacctccaggccacgtttgggcatgtaanccatg

SEQ ID NO: 2421 - DNA, 552 bp, homo sapiens
  misc_feature (521)..(521): n=unknown
cttgctcaagacaccctttttttctccccaaatttgtactgcgtgtctgtcctatgccagcactgtgcaaggctctgggcccacaatggggagcaattggacccagctcctgaagccatggggatcccaggctagtgtgggagacagacaagtgaccaggtgatgacagaagtgcagggggctttgtgaagaaagaggcagaggactcaacctagctgggggcagtcaaggttgggtcctcacctgctggagcaggtaagacctgaaagctgagcagccatccacagggaggacactggggcttgttggtagagctggcctggaatctggaatcgactcgcaacgctgcagtctcgtagctgaacagctggactacccttacccgtaccctcccctcccctcccatcatggctgaagtccagggtttaggcttggtgtagctctggtccattcctcagaatggaagaccaagggaacgtgggctacacatttcacactgctgccagggagtcttcttgaancatccttctgcctgctacctgtagaatgctg

SEQ ID NO: 2422 - DNA, 469 bp, homo sapiens
  misc_feature (23)..(40): n=unknown
aaatttggtaagataatacaganaattcnnagnnaacnnngggtcggcagaaaggattatgggtggaaaacattggctcttccttggggagtgatgctggggaaagggaagagagtggctcagcctgcaggtaaataggctagaaaagccaaggccaaaggctggaggggagaggacagtcagcatgtccagcctggggtctgggtgtagggttatcccttctccctgtgccttcccatctcgtccatgagcctaggtcttggagccttgtgttggaggctgctgtgatgtcaggaacggggatctgtctagcttttggccacttcctgggacctcacgcccctgttgacagatggagattgggcagcagggccttgctgcattgttatctgctgttccgacttggtttgtcttgtccaagggtgacgaaagagccaggcaccagggtctcatgggatgaggtacaggg

SEQ ID NO: 2423 - DNA, 187 bp, homo sapiens
  misc_feature (5)..(185): n=unknown
agtanctccagatcaccagancnaacactctcacntgccagcatganaagctccagcatcagtgganaacccaccngcttgtatagcnanncagagtnaanacacacaacagcgtnccgtgccagcaccannacctcaggcctcactnnngaatcaanaantttgnacagtaagccaggctcaantg

SEQ ID NO: 2424 - DNA, 508 bp, homo sapiens
  misc_feature (3)..(179): n=unknown
  misc_feature (505)..(505): n=unknown
gcngggagaagggcttgatgtagaaagttgtaggttctccaacaaggtctgangctgtggagcgggcaggtaagggtgttgttccagttgcgtctganctgctgtggaaggctgttgattcctgaccaatgtctgtggttgtgagggtggcaggtaacactgtgtgagtgaagcctggnctgtcagggaagggtgtagattgttgactatgaatggacattgtgttgctgtgagaaaacgctgtggtttcagttgagcctgggctgctgtagaaggtggtagattcctcactaaggcctggcactgtggtgctggcaggtgacactgttgacagagctgagcctggttggctatgaggggtggtaaattcttgagcaaaagatgaagttgtgatgctgccaggggacagtgttgtctcagttgaacctggcttactgtggaaagttgttgattcctgactgaagcctgaagtggtggtgctggcagggaacgctgttgtgtgtgntga

SEQ ID NO: 2425 - DNA, 423 bp, homo sapiens
  misc_feature (327)..(408): n=unknown
cttctctttaatctaggtcccattgtgtcttgagggaggactttaagaatgactgagaactatttaaagacgcaatcccaggttccttgcacaccatggcagcctctccttgcaccttctcctgcctctccacactccaggttccctcaggcttgtgtccccactgctgcatcgtggcggggtgtcacagaccctctgcagcccctggctgtcctggactgtgcagagatgcctgactccagggaaacctgaaagcaagaagttaatggactgtttattgtaacttgatcctcccgagctgtgagcgcagtctgaggtgtgaggacnggcctcctgttggagtcccattttctccatcagggcacgtgggcggcttctcnaagcccggaggagctcccaggcgcacangggccgccggtaaca

SEQ ID NO: 2426 - DNA, 376 bp, homo sapiens
  misc_feature (114)..(374): n=unknown
tctaataaaaatattatgatgagattagctacctttattctctgagccttgactctgtcccaggcctgccctggagcgcctgcacgctcagctccctgaggtaggtccggaggnagaacncnngcnnnnncccgcnctcngccaggatacctctnaantcatgnaccctcntccagaancccacagncntggatgccccatagcagccctggcacggctggcagaactgcntccaccctcnacnaacncccaagacaggcaggaacngtctcaggctggcacacagcaggtggtgcgggggtaganggaagaggcgcacccttctgcaatcaaccgctccagcgggcagagctgagggccactgccccccccangc

SEQ ID NO: 2427 - DNA, 473 bp, homo sapiens
  misc_feature (423)..(461): n=unknown
gttcaatgttgatggatatatttggtcatggacaaagaaccgcatgtggagaaaaaatcgttccaagaaccaaaactccaaatgcatcggcactgacctcaacaggaattttaatgcttcatggaactccattcctaacaccaatgacccatgtgcagataactatcggggctctgcaccagagtccgagaaagagacgaaagctgtcactaatttcattagaagccacctgaatgaaatcaaggtttacatcaccttccattcctactcccagatgctattgtttccctatggatatacatcaaaactgccacctaaccatgaggacttggccaaagttgcaaagattggcactgatgttctatcaactcgatatgaaacccgctacatctatggcccaattagaatcaacaatttacccgntatcagggtcttctttagactgggnntatgacctgngngtcaaacacaca

SEQ ID NO: 2428 - DNA, 530 bp, homo sapiens
  misc_feature (5)..(5): n=unknown
  misc_feature (139)..(247): n=unknown
  misc_feature (394)..(514): n=unknown
gccanagctgctgagtggcgggtgtggacggatctggtccgggatcatttcatggggccatggtctgttacatctaataacaaaaaatcggcgtgtctttctgttcatatcatttttctagtatttcttattgcatttnacaaaggcattgctttgtgaagaactggaaattganaaanaagccggatcctctgccanagataatgtgagacacgtggacacagcgtgtgtagtctgggtgggtcanggagctcctgccctgctctctcaagtggagaccggggtgctcagatacctgcacccctcccgcccatgcacacacaggagcccctcctagcaccaactcacttcctcctcacagcagcccaggacgtggcccctgctggctcagcanacaagaggggaaatcgangcaagaaaggcatatgggcttccttgaccaaggcncnanggttctctgtgggataagcctcagntctaaccactgcaccatctgggcctcactgcctggganggagacttgtgcttgg

SEQ ID NO: 2429 - DNA, 532 bp, homo sapiens
gttttcacaagtataaacaatggtgatgtaagtcaacattgctgtagccaggtgtgaaggttgtatggtgtgtgacgaatgtacatcatgtttgtaggtttggatgctaatcttgaattgtagcttaaaaaatacgtatttttgtaactctttgaaagtttatgaagactgacagctttccttgtaagcactaagagaaaaaaaagaaagagggacatttgacaattttaaagaaacaacaagaaattagaatgaaaatctgtgacaaacagcgtcagtgtggccatgtccacattcctacatgtctctctctacaagcacctctctaagaagcctgacatcccggtggactctttatagtcatgtacacttgattccagatgagctctggtcttatctggatgctcagataagaggtttctatctgagcatccagatgttccctcaggttccaagacatttcaccccaggccctggggttcactctggaattcgtagggcttcacgtctctctagaatgacgtggaaaatt

SEQ ID NO: 2430 - DNA, 317 bp, homo sapiens
  misc_feature (33)..(306): n=unknown
ataaacataggaaaagggtttttaatgcaaatncatgtcntttttcaaaagtgttgnactgtctggagaaaaattattncaangctatctaaggcaaaaataatnnttnaccanctaaacaaaacnncatcncctttaccatttgttttgtatntaaancaagacatntnaaacacaantaatacggagangttttcnaattgctacgtcatttgcattaagaattnaactgcatctaagaagtgaagagntnaaacacatgggcangttctcnagtaacagntantgcngcnttctncaganccnttctgcttgaa

SEQ ID NO: 2431 - DNA, 280 bp, homo sapiens
  misc_feature (102)..(102): n=unknown
ggtttgtctctagttactgggtgactttatttggtaaaaatgcgttcagctgcagtagcatattcaagtgttgctagttagtaattatcttttaatttttgntttagttaaaagatggaagacccgtttgagctacttcttacaaaattcctctactcctggggaagcccaaaaccggcaaaaaaagcaaacagcaagctttcatcaagtaagttgagatcctgtgcttgcaaatatcaatagttagctgctgaactgaaagggggactctgatgtgcgt

SEQ ID NO: 2432 - DNA, 476 bp, homo sapiens
  misc_feature (289)..(437): n=unknown
cacttcaaagtgtagctgccttcaagacagatttttggcactcataacggacactgcagttttcaacaccatagcactcattctatttcacacatcatttttaacaatgcaaacacggaccatttcagttttagcattacatgagacaacagtactgatgatctgtggtcataagaacttcaataccgttgcacatagtaaacacttcactgttactgaatcctaaactaaaactactatgtggtaacatggatcgatttagggaaagatgtacaaccagctacctaangncacataatcccagatctattgattttaaatgcttttngaccaacagtattacattgtctcnttcatcatcttacattcctgcttttcagagtgagacaccacgttcagaccacctattcccttcttgcggttctgtacacagtganggaagctgttctgataccagcttctcctagtcagttact

SEQ ID NO: 2433 - DNA, 207 bp, homo sapiens
  misc_feature (151)..(186): n=unknown
gttagcactttcatcaccaaagaccccgtgcctctcgtggtcctttgagggatcccgccgccaccacccttgtattttatcacgtgctcttcagggcatgtggaattcgttgagtttgcttttagagccaagtttctttccctgtgtgggnttttgangaaaanctgaggncccctaancngtggncaacaacccccccccggcggc

SEQ ID NO: 2434 - DNA, 533 bp, homo sapiens
  misc_feature (482)..(482): n=unknown
tagttacaaggtcaatacaagcctccagtggaagctctttatttggtttaattccatctccagagacaaacaggcaactctaggacctttacagtggcgatcggcctcacacagcaaaatgctccaaagtttagaattagtgcaacacacatacgaacgttttaaaggtgctcaacatcaggttaaaatagaattctggacctttttaaaaagtttttggatgatataagcacaggaggcagagccaataagaaacatgaaaccaatatttctggaaaaacacttagcatgaacgtcactttttgacgtcgtgtaaactttcttctgcaatgacggatgttaccaaaaggcattgagacctttgcgctgcgctggttagacaagccgcagttactctccacggtgagcaggataaaaacccccaaggaacagcccatgacaaccttctgtgcctttttatactttcccatcctacaaagganaaactgggtaaaggacaagttcctccctttcattgcgtttctaagaacttt

SEQ ID NO: 2435 - DNA, 390 bp, homo sapiens
  misc_feature (57)..(202): n=unknown
  misc_feature (341)..(343): n=unknown
ggcaagcaaaagcccatgtccaggagccctgggtgtccccacaggctcgcctctganagcctctttggggtgagcagccttgtattggccacaggtgcactaaattgactgtgaatcccaaacctccccagaccagccaggccgcctgcncccacccagaaccttccggtttgccctgtatggaaagccactctcggaaatncctctttcctgagtcagcaatcgtggcaaggggacatgtgttccaacagcggctggggagtggacctctctgtcccttgcccaccttaagccccaaatccggaccccctctgacatcactggcattgcacctgggtgtncncccctccccacgctatggacccagataggaggggttaggcatggggg

SEQ ID NO: 2436 - DNA, 486 bp, homo sapiens
  misc_feature (196)..(243): n=unknown
tatttctataggcgagccgtatacagattctccaggaataaggcacacaacggaatgccatcccaagggctgcacttcggagacgtcggagccttctccacgcaccttccgagctgggcccacgggttctgttttgtctttttagctggactcacacgtatggacagacacagacacggacggggtcaccgcatgntggcggaggaggtcggacggcaaggttggcaacagagaaggataanncccgctgccacagcccccaggggaccgcttggccatctcgctgaaggctggaacacccccatttcagggttagtcgttggactgagctacaatgtagtgaggttggattaaatattcgtttagagtagattcaagtctattagatgctggagggctggtgtaagggctccggttgacatttccaagttcaaggagcatggcctggaggaagcgtggctcagatggcaaagctcccgagcggcg

SEQ ID NO: 2437 - DNA, 275 bp, homo sapiens
  misc_feature (230)..(230): n=unknown
gcctgggctgggatgaactggattgagctggcctgggctgggatgaactggaggacatggcactgggccaatcttcatgatcttgttggacatagatggatagcctcagctgagtctacactgcgttccccatcacacccaccctccctatactcactcccaggcctgggttgtctgcctggggagacttcagggtagctggagtgtgactgagctgggggcagcagaantgggctggaaggatctattggctgcctgcggggtgtgtggctcca

SEQ ID NO: 2438 - DNA, 555 bp, homo sapiens
  misc_feature (183)..(287): n=unknown
  misc_feature (467)..(525): n=unknown
atctcaccccgttgacacggttagtttgcatgcacacacagagcggccagccgccccgagcctgtgggcaggccagcagggtcagtagcaggtgccagctgtgtcggacatgaccagggacacgttgtacagggtgggtttaccggtggacttgtccacggtcctctcggtgaccctgttggncagggcctcatgntccaccacgcaggtgtaggtctcccccgtgttccattcctcttcggacacggtcaggatgctgtngncgaagtaccggcctggngcctggngctcaggcattggggcgctggtcacatacttctccggggacaagggctgccccctctgcatccactgcacgaagacgtccgcgggagagaagcccgtcaccaggcacgtgatggtggccgactcccgcagttcagctgctcccgggctggtggcagcaagtagacatcgggcctgtgcangggcaacccccttgggccgggagatggtctgcttcagtggcgagggcaggtctgtgtnggtcacggtgcaacgttaaacttttcccgg

SEQ ID NO: 2439 - DNA, 398 bp, homo sapiens
ccaggcccgggatccgcagtgtttccattcagtgatcagtcctgaagacagaagactcagtatggaactctggctgacctggtttctccttcttgccattctaaaaggtgtgaagtgtgaggaggaagtggtggcatatgggggaggcctggtccagccgggggggtccctgagactctcctgttcagcctctggattccccttcagtaaatatgctatgaattgggtccgccagacgccagagaagcgactggaataccttgcagccatcaatagtaatgggagtgttacaaactacgcagagtccgtgaagggcagattcaccatttccagagacaattcgaggacgactctgtatcttcaaatgagcggtctgaaaactgaggacacggctgtct

SEQ ID NO: 2440 - DNA, 527 bp, homo sapiens
  misc_feature (487)..(487): n=unknown
cgggcggctcagtagcaggtgccgtccacctccgccatgacaacagatacattgacatgggtgggtttacccgccaagcgatcgatggtcttctgtgtgaaggccagcggcagggcctcgtggcccaccatgcaggagaaggtgtcccccttcttccagtcctcggctgccacgcgcagtatgctggtcacagcgaaggtggtggtgccctggctgggctcctgccgggatgcccaagtcaggtacttctcgcggggcagctcctgtgacccctgcagccagcgaaccagcacatccttggggctgaagccacgtgccaggcacgtcagcgtcaccagctcgttcagggccagctcctccgacggcggcggcagcaggtggacctcgggccggaatgtgtttccggattttgagagggtggcggttagcggggtcttggactcggggtaggcagcagtgcaagtgaaggtcttcccatggttccatngctcggcacagcccgggaaggacactggacacgctgtagc

SEQ ID NO: 2441 - DNA, 580 bp, homo sapiens
cagctactcacaatgaaccaggtgttcggttaaaagccagaagttatgagcttcaggaaagcaatgtacggctgaagttaaccattgttgacaccgtgggatttggagaccagataaataaagatgacagctataagccgatagtagaatatattgatgcccagttcgaggcctacctgcaagaggaattgaagattaaacgttctctcttcaactaccatgacacgaggatccatgcctgcctctactttattgcccctactggacattcactaaagtccctggatctggtcaccatgaaaaagctggacagtaaggtgaacatcattccaataattgcaaaagctgacaccattgccaagaatgaactgcacaaattcaagagtaagatcatgagtgaactggtcagcaatggggtccagatatatcagtttcccactgatgaagaaacggtggcagagattaacgcaacaatgagtgtccatctcccatttgcagtggttggcagcaccgaagaggtgaagattggcacaagatggcaaaggccaggcagtacccctggggtgtggtgcaggttgag

SEQ ID NO: 2442 - DNA, 437 bp, homo sapiens
  misc_feature (8)..(427): n=unknown
ttaaagcnaanncntnaggaggnnggtnangtnaaagatnanctggangaccgcaatangggtangtcncctgtggaaaaagggtcagcnagccaaaggatggnaggnggtcaggctggaactgaggagcaggtgggggcacttctccctctaacactctccccngttgaagctctttgtgacgggcgagctcangccctgatgggtgacttcgcangcntanactttgtgtttctcgtagtctgctttgctcagcntcagggtgctgctgaggctgtangtgctgtccttgctgtcctnctctgtgacactctcctgggagttaacccantgganggcgttatccacttccactgtactttggcccctcngggatagaagtattcaagcaggcacacaacagaggcagttccagatttcaactgcncatcagatgg

SEQ ID NO: 2443 - DNA, 343 bp, homo sapiens
  misc_feature (15)..(108): n=unknown
  misc_feature (221)..(321): n=unknown
aagccctcgcatganaggccagcctgctagggaaatccaggaatctgcaacaaaaacgatgacagtctgaaatactctctggtgccaacctccaaattctcgtctgtnacttcagacccccactagttgacagagcagcagaatttcaactccagtagacttgaatatgcctctgggcaaagaagcagagctaacgaggaaagggatttaaagagtttttnttgggtgtttgtaaaactttnatnccctgtntgtntgcagaggggattcaacttcaattttnantgcagtggctctgggtccagccccttacttaaaganctggaaagcatgaagactgggc

SEQ ID NO: 2444 - DNA, 532 bp, homo sapiens
gaaaataatacacgtaaaccacaaaagagtagcattccattttcttgaagtgcacatgatattatgaacaatacaaatgcattatttttatcattaatagtttaatcattaattatctcataagtcaatgcagagagtgaaattactatgaattaaacttctgttcacaatgtacagtattttgcatatgttgactttacttaattgtacatttttgtttccaaagttaatgtgcataggttgttgtcaagcaattactctcattgtcttgtcatacatgctaacattttgctaaatataaatctacaagtatcacagctgcatatatttctgaagtggttagaacagaggaggatgctggaaagttgagttctttaaaatcttcgttcaaaacaagagattttcatctatgtcctcttctttaattccaaagcagtggccccactccttcagggtgatgtgctatccttgttggggtcacactcctcaaagaaacggggtatgcagtgttccatgggcaccagagatgctc

SEQ ID NO: 2445 - DNA, 505 bp, homo sapiens
tgggagttgtggttttacctgagactcctggccgttgagcccctgtgcaaggctggtcgaaggctctggcattgcaagcctcgcttcgttgccacttcccagctcttcccgccttccgcggtataatcaacactacgagagatagagccgcctagaaccaggtctccagaaatgctttgggttcatctttcattgctgcaaggaacttccatgcctctaacactcatcttcaaaagactgggactgctgagatgtcctctattcttgaagagcgtattcttggagctgatacctctgttgatcttgaagaaactgggcgtgtcttaagtattggtgatggtattgcccgcgtacatgggctgaggaatgttcaagcagaagaaatggtagagttttcttcaggcttaaagggtatgtccttgaacttggaacctgacaatgttggtgttgtcgtgtttggaaatgataactaattaaggaaggagatatagtgaagaggacagga

SEQ ID NO: 2446 - DNA, 389 bp, homo sapiens
  misc_feature (4)..(322): n=unknown
acanaaggagtatgagagtaacccttttacaaatggaactaatttactagaacaatgacaaaactgaactggnatttgatgtgaatccacaggagtttaagcttcaaatccagccaagaaatttgttacaatctctttcagctttgcatctgattgntctgagatctttccatcagccctgatagtgcccaacaaggcttggtgccggcngacgacatgagacaagaaagcattctcaaactttgtaatcttgctgggctccagtttatcaagatatccccttacacccgcatagataacagccacttgtncttcaatagcnatgggagaatactgtccttgcttcagcaactcagttagacgcacgccacgactcaaaagttgttgag

SEQ ID NO: 2447 - DNA, 522 bp, homo sapiens
cagggcactctctcctccacaagaccagacggtggaggtacatcccctcaatggaaatgcccacacttcaccctaaagacagatcctgctgtcagcaacaatgtgagtggcccacacatttgtccagcatgaaaccgtttgcagattcctttccagtacacagtcccatcagccggtcacttcacgatgacagctcctcgaagcaccttttggtttgccgtggtgtagcttagaagtaggagcctgcacggcttcaggaattcacagaaggagcacacttagggcttggagaagttaattataggaatatcctgcaagctgctgctctgagcctgtgcacctggagtgtttccctggcggtcctgtgtatgaggatactcatcagcatggggtttgggaagcctagcactggagacaacctaggtggtcctctccaggggagtaggtaagagccctacagcagtgaaaagcattgaaggaaaagtgtgttcagcagtgcccttaatctgatcagagcagcct

SEQ ID NO: 2448 - DNA, 205 bp, homo sapiens
  misc_feature (3)..(18): n=unknown
  misc_feature (147)..(197): n=unknown
ggngangaagggccagtnccttctggagactctgacggagggtgtgttccaggttcttcccactcccagggttgccagcatccttggcattccccggcttgtaaaggcatttctccaatgtatgcctccaccatcacttggccttcngtttgtgcctnccaccgtggccctttcnctgtgcccatctctacnatttnctaaatta

SEQ ID NO: 2449 - DNA, 352 bp, homo sapiens
  misc_feature (2)..(122): n=unknown
  misc_feature (267)..(333): n=unknown
gnggcctcttcggccacctcctctctctcttcctacccgnccccggttgctacctcttacccgtccccggttactacctcttatccatccccggccaccacctcatacccatcccctgtgcncacctccttctcctctcccggctcctcgacctacccatcccctgtgcacagtggcttcccctccccgtcggtggccaccacgtactcctctgttccccctgctttcccggcccaggtcagcagcttcccttcctcagctgtcacnaactccttcagcgcctccacagggctttcggacatgacagcaaccttttctcccaggacaattgnnatttgctaaagggaaaggg

SEQ ID NO: 2450 - DNA, 65 bp, homo sapiens
gtggaattgactggaaggcagtccagtgaaatcacaagaaccataaccaaactctcatttgtgaa

SEQ ID NO: 2451 - DNA, 489 bp, homo sapiens
acacgtgtcttctgtggagctctgagaacaggactccagcaaagcacttttcagccttgtggtcttcaagcatttccaagatctttgctgcaaggagcattgtactcagcaattgcaaactcatccgtctcgtagtaatcatagactttcactatggctggtttcagatctcttactgggacatcttgcagaaccgtgaagaacaagctcagtgtctgatttgacaccttatcaaggtaaatcaagacatggttgctgctgacttctgtccggctcacatggttagatctttcaagcattttcactgttggcttcaggggaatgaagccagagaccatcttcacatcaacgatcgccatgttggaggcagagcggctccctgtgtaactgacacttagggagatttggaagctggtgtgggctttgggttcatcacaagtttgaggcagagtctgcactcctaaagcaaaggggaactcttccttttct

SEQ ID NO: 2452 - DNA, 461 bp, homo sapiens
caacttctaccagctgaggaattcctgaagtgctccgaagacaacccgctctttgccggcatcgactgtgaggtgttcgagtcacgcttccccaccaccatggccttgtccgtgctcgtgaccattgaaatgtgcaatgccctcaacagcgtctcggagaaccagtcgctgctgcggatgccgccctggatgaacccctggctgctggtggctgtggccatgtccatggccctgcacttcctcatcctgctcgtgccgcccctgcctctcattttccaggtgaccccactgagcgggcgccagtgggtggtggtgctccagatatctctgcctgtcatcctgctggatgaggccctcaagtactgtcccggaaccacatgcacgaagaaatgagccagaagtgagcgctgggaacagggtggagtctccggtgtgtacctcagactgatggtgcccatgtg

SEQ ID NO: 2453 - DNA, 445 bp, homo sapiens
  misc_feature (150)..(237): n=unknown
  misc_feature (397)..(397): n=unknown
ctccttccctggggggtcaaggtcagcatcatccagcctggctgcttcaagacagagtcagtgagaaacgtgggtcagtgggaaaagcgcaacaattgctgctggccaacctgcctcaagagctgctgcaggcctatcgggggtcccaanaaaggnggnnaacccttnaaancnaattttccgggaagggncccaancttnttggggccaattnggggggggnnccaaaggttttnncctgcactcgctacgcctggccatgtccgacctcaccccagttgtagatgccatcacagatgcgctgctggcagctcggccccgccgccgctattaccccggccagggcctggggctcatgtacttcatccactactacctgcctgaaggcctgcggcgncgcttcctgcaggccttcttcatcagtcactgtctgcctcgagcactg

SEQ ID NO: 2454 - DNA, 617 bp, homo sapiens
  misc_feature (519)..(608): n=unknown
ttgggaagtacagtacatgcttccctgtggcttgggggtgtgtagttggggccctaattcttgagccagtcaagagacacttgggatttagccctcaattgcagcactgaggcactggtgccgagaaacaatcctgagggggtccccaacccacctagtcactccttagtttgcagaggcactatctgcagagtcctgtgaaaggctgcagtgaagtcttgcatgagactccccatccagcggagttctccaagctgcagggtagagcgttgtgccaggagggtgtttgggctcatgaaacagtggagaggcgcagaggctcactgggaaaccttggcctcaccgggcctggattgggcatcggcagtgggcatgaagtgggggtgggattctttaggccagggtccaggacacttgggggatcgtaatgctgggggttttcggggaggaaccaagggctcacggagcctcctgtgctgcagtggctgggccataggtgcacatggctcaccgagccantgctggggaagggccggggctcaggtttgggtcctgggctgcgtcctgtggtggggtagtgccaggctggccaagctgcagtgctcgangcagacatg

SEQ ID NO: 2455 - DNA, 326 bp, homo sapiens
tcttggcgcctaataaactgtattctttgccaacagtgaaagtgcttctctgttgcttggtaagttttttccccttagaatactaataaagtaattgattaactttcatttttattttgatttgattgggacagcaatttagcagtaaaaaatgtcacctttataaatcctgtggtttctggttcttggccagttaaattcaacctgaccaggaggcacgcttaattctaaaattgcttttaccttctgaagtttttgtggtatagacatcctcctttttctactttaatgaaagcatgttataagcagatcataacaattttttt

SEQ ID NO: 2456 - DNA, 384 bp, homo sapiens
  misc_feature (364)..(377): n=unknown
cttatatataatctaaccaaagagttacccagtagggttttagtttttgaacttttattttcttgttgattataaatcctgattttggaatctattgcgcaaaagaagtttcattttggttacttagacctaagatcacttattaaaaatccttattttctccaagcccagcaaacgttgacttctgggcaaacctgaaaacctgaaaatgccactttcatgcagtttgtttgaagttaagtggaatcctttcaaatgacgagctgcagagaactcagcacccaagggctgcctatctgtagatagctgtaaaatggaatatttttaaatgaaggcaaataagtacttaaaagtggagtgagcnataaaatggtccnaataata

SEQ ID NO: 2457 - DNA, 384 bp, homo sapiens; identical to SEQ ID NO: 1337

SEQ ID NO: 2458 - DNA, 367 bp, homo sapiens; identical to SEQ ID NO: 1338
  misc_feature (14)..(14): n=unknown
  misc_feature (246)..(246): n=unknown

SEQ ID NO: 2459 - DNA, 231 bp, homo sapiens
agtttttccaacatctaattgagcttttgattaattccgtgtaccagattctactgaagaaaggtagccatggaagagaatatggaagagggacagacccaaaaagggtgttttgaatgctgtatcaaatgcctggggggcattccctatgcctctctgattgccaccatcctgctctatgcgggtgttgccctgttctgtggctgcggtcatgaagcgtttctggaatgt

SEQ ID NO: 2460 - DNA, 541 bp, homo sapiens
  misc_feature (375)..(512): n=unknown
tggcagcagagttggaggaattgtatggagacattgatgcgttggagttctaccctggactgcttcttgaaaagtgccatccaaactctatctttggggagagtatgatagagattggggctcccttttccctcaagggtctcctagggaatcccatctgttctccggagtactggaagccgagcacatttggcggcgaggtgggctttaacattgtcaagacggccacactgaagaagctggtctgcctcaacaccaagacctgtccctacgtttccttccgtgtgccggatgccagtcaggatgatgggcctgctgtggagcgaccatccacagagtctgaggggcaggaaagcagcattctggaggggaganctttgtgcttgtcattccagagtgctgangccagggctgatggtcttaaatgctcattttctgggtttggcatggtgagtgttngggttgacatttagaactttaagtctcaccccattatctggaatattgtgatnctggttattcttccagaatgctgaaactc

SEQ ID NO: 2461 - DNA, 285 bp, homo sapiens
atgccacaaggagagtgatctcttcccctgttttcacaatggaggactccggaaagactttcagctccgaggaggaagaagctaactattggaaagatctggcgatgacctacaaacagagggcagaaaatacgcaagaggaactccgagaattccaggagggaagccgagaatatgaagctgaattggagacgcagctgcaacaaattgaaaccaggaacagagacctcctgtccgaaaataaccgcttcgcatggagctggaaaccatccaaggagaagtttg

SEQ ID NO: 2462 - DNA, 425 bp, homo sapiens
gagagttttgtcccacagtcagcaggccactagtttattaacttccagtcaccttgatttttgctaaaatgaagactctgcagtctacacttctcctgttactgcttgtgcctctgataaagcccagcaccaccaacccagcaggactcacgcattatctatgattatggaacagataattttgaagaatccatatttagccaagattatgaggataaatacctggatggaaaaaatattaaggaaaaagaaactgtgataatacccaatgagaaaagtcttcaattaccaaaaagatgaggcaataacaccattacctcccaagaaagaaaatgatgaatgcccacgtgtctgctgtgtgtttgtttaagtggcctgtatactgtgaagaagttgacattggatgctgtaccacccttaccaaa

SEQ ID NO: 2463 - DNA, 427 bp, homo sapiens
  misc_feature (195)..(230): n=unknown
  misc_feature (381)..(408): n=unknown
tatattcaattcaaatgtactcactattgtgctaggcaattgaaagtaaaaagtataaagctgcattttgcgctctcagtgaggtttaagtcagggaaatgaggcatgcacacaaaataacgagaaagtagtataatagctgtgatcattagttatcaaaataagtgaatgagctaataatcattgttagaatantaattgtgttcttagatctcagatgctttaatganaaatgttatcttgaggtcaactttgacaaatggggagataactgaaaaacatctgacattctaggtagggaaaacagaagcaaatgcttaaaaatgggaataagtatgtattctgtacacagagacaaacttgatttcaatacgatacttnatggnggaaataatgtttgnacttnnncttacacagtccgggactc

SEQ ID NO: 2464 - DNA, 572 bp, homo sapiens
  misc_feature (543)..(543): n=unknown
ggcaaagtggcgctgtgaccggcgcggctcagggcataggcagagcctttgcagaggcgctgctgcttaagggcgccaaggtagcgctggtggattggaatcttgaagcaggtgtacagtgtaaagctgccctggatgagcagtttgaacctcagaagactctgttcatccagtgcgatgtggctgaccagcaacaactgagagacacttttagaaaagttgtagaccactttggaagactggacattttggtcaataatgctggagtgaataatgagaaaaactgggaaaaaactctgcaaattaatttggtttctgttatcagtggaacctatcttggtttggattacatgagtaagcaaaatggaggtgaaggcggcatcattatcaatatgtcatctttagcaggactcatgcccgttgcacagcagccggtttattgtgcttcaaagcatggcatagttggattcacacgctcagcagcgttggctgtaatcttatgaacagtggtgtgagactgaatgccatttgtccaggctttgntaacacagccatccttgaatccattgaaa

SEQ ID NO: 2465 - DNA, 335 bp, homo sapiens
  misc_feature (64)..(94): n=unknown
  misc_feature (332)..(332): n=unknown
gcggggactcaggatggaaaccagcagcctgcaccgcccgagaaggtcggctgggtccggaaantctgcgggaaagggatttcagggagatttngaaaaaccgctatgtggtgctgaaaggggaccagctctacatctctgagaaggaggtaaaagatgagaaaaatattcaagaggtatttgacctgagtgactatgagaagtgtgaagagctccggaagtccaagagcaggagcaagaaaaatcatagcaagtttactcttgcccactccaaacagcccggtaacacggcacccaaccttgatctttcctggcatgagtcccagaagagnagg

SEQ ID NO: 2466 - DNA, 325 bp, homo sapiens
  misc_feature (38)..(286): n=unknown
ataagagtctgtccaacccgacaagttccagaccccancctgccctcacatcaggctcttccggtactgactgtgcggggtggtctgtctgangtgggagtccngggtctgcaggtccatctgtctgtaaangnctctnaactccctganctcctgcancacccctcttttnctggctccaattcgatgatgcctcttccaacagccgttccgtctccagcagcagctgctctgactcagaatccggcggagaccnangggggtccntgggctttcgcttcccatntcccagtccctgaaactctgccaaaagctcctgagtctc

SEQ ID NO: 2467 - DNA, 490 bp, homo sapiens
  misc_feature (154)..(154): n=unknown
  misc_feature (424)..(477): n=unknown
gtaaggaacggagccaaccctggggaggacccccggtcccctctcccagagtatacggagcctgaacctccccacttcccccaactctgttcgcggatagggtctagttgcctgctctcggacatccgttcagcagacactacctcttcgtcancccctgcccaccctgacccgcctttacctcgcgtctagaggacacagccagggatcatcccgcagccccgaactccttcacagacccccactagccggggacgcagctcaggccccctacccccaacacaaacacttctctcctgtagaggataaagcttggggttcatcctccttccctggatcactccacagtcctcaggcttccccaatccaggggactcggcgccgggacgctgctatggacgacattttcactcagtgccggganggcaacgcagtcgccgttcgcctgtggtggacaacacggagaacgactnaacnagggggacgtcat

SEQ ID NO: 2468 - DNA, 442 bp, homo sapiens
  misc_feature (50)..(198): n=unknown
  misc_feature (389)..(397): n=unknown
gtctgggaaatcctcgcctaacaaagtggcttttgattcaaggcctgaanaangggagggcccantccaggtagatgacatggccanggcaaaacctgaggccagagtgtgcctggggatatgagggacgtggagggcacccatgtccagcccacctcagtgcttctgcctcagtgagaangggagggagttggccanaagggggcctgggtgcatcaaataggaagccggtgagtcaagcagctcggggccagtggggctggagagatgccagagccaggggctatgtgtggacttagggtttggaaccattaaagggctctgcgacgggagtggcaggatatgacctatttttgagacattgtgctgagaacaggccttaaaggcanaagcacanagcctggctcggggcgctgcagtactgcggacgcgtgggtcgacc

SEQ ID NO: 2469 - DNA, 265 bp, homo sapiens
  misc_feature (185)..(185): n=unknown
caggggcaaggagagcccagagagaagcgccctggtctcttgagcttcctgatctgctcctgtcccccgctctcctccactcccttgcctttccctaggttgtcccctccctgggcttttgtgtgttttgggagatgtcacctaaccaggacattgatattcaatcccatcccccttcctcccancctgcccccactttgatttaatcctttggctgtgggctgaggcctcccagggaagctgggtggggtgggtgttgagaccc

SEQ ID NO: 2470 - DNA, 337 bp, homo sapiens
  misc_feature (293)..(324): n=unknown
ggacggaactgaagagatcgaatgagaagaaccccggggaacttgcccagcacaaggaagaccccaggactgatgtcaaggcatacgatgtgacacggatggtgtccatgccccagacgacagcaggcaccatcctggacggagtgaacgtcggccgtggctatggcctggtggaaggacacgacaggaggcagtttgagatcaccagcgtttccgtggatgtctggcacatcctggaattcgactatagcaggctccccaaacaaagcatcgggcattccatgagggggatncctatgtggtcaagtggaanttcatggtgancacggcagtggga

SEQ ID NO: 2471 - DNA, 414 bp, homo sapiens
  misc_feature (65)..(77): n=unknown
  misc_feature (269)..(412): n=unknown
ccataagtcaaatatgtatttaacaaagcaatatgtattcattcactttcaagatttgttttggngtcaaaataacntgaaaaggtagatggagttgcttctgttgaattagctctgccaccaatatgtatcttcatacacgtttggaaatgtttcctgcagcattaggtatgacttgttctgagtactgcttccggtgctaaaatgaacaaagaatttgtacttaatggcatggactctggagaatctatgcgaatcaacctttctancttaatatctccccaaaaatgtatagtgccttgtttttatgtacagtttatatacagnaaagtttgctctgcatttntgatgatggtttggaacattatctacaattttactctcaaatagtcaaaatataaacatctcaatntc

SEQ ID NO: 2472 - DNA, 347 bp, homo sapiens
  misc_feature (342)..(342): n=unknown
ctccaggatgctgggtctgccccttgggaggggcactctggaaggtcagggtgatccacaactgtgagctgaggttggatgcagctgggagcttgggacagagagagcccagggctcccctgctgtggggcacctgcccagcggggacatgagatgacagagacctccccggcgggggtactcaggtgctacgaacatggcagctcttgtttccggctgagccatggccagagcagggctcagtctgcccctgaacttgctgaatggaccgacgagctgagcctgaaagcccagaagagcctcggtccagaagacggagactcggcccggtgtccagcgcanccagg

SEQ ID NO: 2473 - DNA, 473 bp, homo sapiens
aatttcatgaatactttgaaagggccattagaaaaaataagagccaatttgggtcatttgagaaacattttcagcacaattacagtgggggcacgggccgttcggctccagctgggttttcccagatgcaacaatcgcggttctggcttctccactggtggggatggggatcgcgccttcggagctctcagggcgcctgtctgtcgggggctgggtgcgtccacagccccgggggatggcgcgtggcgtagccaggaacggcatgtgggtgggtctctgacctgcttgtgcagggacttgagggacctcatcccgatggccgaggcaggggctccccacgggataaaaggatccggcctggccttggggtccaagaggagggccaagggagtggacctggcccctgtcccctctcctcctcgaaacactggacacctgaagcgagactatggctgctgaggatctgtgtgatg

SEQ ID NO: 2474 - DNA, 483 bp, homo sapiens
gtcagatccgagctcgccatccagtttcctctccactagtccccccagttggagatctgtaagtagtagttgtcattctgggggcagattgcaggggaggggggtgttaaaagtcctatagggtattctataggggctggggtgcacttaggggtccctgttgtcaacctcgtaagggccatggtgggggcagagttgtgatttggatttctctctgccttatcgtcttagattatcctagactttccccaaacagcatttctcaagattgccagtgagaagtaccattttgggggtgcttattaacgatatcaatgcctggacccaactccatttcccaactctagaatccccagaaaaactgccttaaaaaaaaaaattagtcccgagtgattcttgttaagaggctaatccaggagatatgctcccttggaaatctcagaggtccggtgcagacaatccaggcatctcacttttattcta

SEQ ID NO: 2475 - DNA, 278 bp, homo sapiens
  misc_feature (258)..(258): n=unknown
ggagttggatcccgagggttccctgcaccaccagcaaaaacgggaagctccaagccgcagctctgcttcctcgggacctcagatcctgaaatgcccggaggctgagtgtttcaggctgcgctgtgagctcgggcccctgcaccaacaagagagccaaagtctgcagttgcatttccgagtctgggccaagactttcttgcagcgggagcaccagccatttagcctgcagtgtgaggctgtgtacaaagccctgaagangccctaccgaatcctgcctc

SEQ ID NO: 2476 - DNA, 586 bp, homo sapiens
  misc_feature (415)..(415): n=unknown
  misc_feature (542)..(542): n=unknown
agagtttaaataagtcctgggtgtctggtgccaaggtgagggaagggttgggcagagagatgaggggcagcatcagtgcagctggcaggcagaacccaaattctgcaggcccaggacagtgggctcccctttctctggggaacagggagggcctgtgtctggccaggctgaggttccagatctgttgccatcatggccccttcagggtcctgggaaattcctggcttctcctaaatcagggtgaactgggcctccaggatcaggtctggagcaggcccaaatatagtcctggatctgcctggattaggtgccaatgtctgagtctgggttccagatcaactccagaccccaggctggatctggccccatttgagttctgattccccttggagctgggctctgggccctgggccancatctatccttgtgtggcatctgtcctgagctggtcctggggcaccatgcatagttagtgttctttgttggcccaccagggtggggctgtccagaactgccaggtcttaactccccaagttccaggntcttaactgggggcttcttttggatctctggcaaggctgaggac

SEQ ID NO: 2477 - DNA, 242 bp, homo sapiens
  misc_feature (222)..(222): n=unknown
ttattattttgtaaatgtttatcttcttctgtcttctccctccctgaatctattttactgttgtttattgttgaatctgtgtgtcagccaggagagcgctgtctggccttgaacatgggctgggatgggaaagggtctgggagaagatgggcaacaaagagccagggagtcatggacatcgcagcgacgcagaccccagcaggttcagtcccgtgctgccancaactgtccagctgggtgtc

SEQ ID NO: 2478 - DNA, 192 bp, homo sapiens
  misc_feature (9)..(192): n=unknown
gccggggcntantgntctcacataacngtagacaaccaaaatttgttgncatctcttcaaagaatcganaattgcgtacaaaaaaaaccttanataagttaagaatgaatacatttacaggcgtaaatgcaaaccgcttccanctcaangcangnnncngnccacggtgntctggccanagncattnancnn

SEQ ID NO: 2479 - DNA, 314 bp, homo sapiens
ctctaccagcaacttgagcaaaatcgccgcctcactaatgaactaaagctggccctgaatgaggattaaacttaagagtgaaaaaacttgggctgaattctaggcgtggagcccatgtgcagaaaatctaagactgtcctaccttcaactaatagagttgaaaacagttgctttctgcagaaatgcaaatgcaaggaattggctgaaaggctggccttgcctgcttgtttctctatatggctggaataattacgttctctttaatcacaaaacagcttttatggtagatacttatatcaattcagcactgtcct

SEQ ID NO: 2480 - DNA, 295 bp, homo sapiens
  misc_feature (29)..(286): n=unknown
ggaaaagagcacaaaaattcaactgatanagaacaacaactgaaagtcacaattatccaangtagtttgcaattacttttcagtttcttaaacagctcccctcaacttnnttnttttaacagtcttgctaatttttcagctgcaacagcntcaagttttcacagaattangagcctcngggaggggacccgcnttcaagatactgaaggtgacatcaagagtctcctcctnacaggaccaaactctatctaaaagttgcttacgngtaacntgaatcttgtgtaanagtctacat

SEQ ID NO: 2481 - DNA, 513 bp, homo sapiens
  misc_feature (405)..(405): n=unknown
tgctgagccagtcacctgtgttccaggagccgaatcagaaatgtcatcctcaggcacgccagacttacctgtcctactcaccgatttgaagattcaatatactaagatcttcataaacaatgaatggcatgattcagtgagtggcaagaaatttcctgtctttaatcctgcaactgaggaggagctctgccaggtagaagaaggagataaggaggatgttgacaaggcagtgaaggccgcaagacaggcttttcagattggatctccgtggcgtactatggatgcttccgagagggggcgactattatacaagttggctgatttaatcgaaagagatcgtctgctgctggcgacaatggagtcaatgaatggtggaaaactctattccaatgcatatctgaatgnttagcaggctgcatcaaaaacattgcgctactgtgcagttgggctgacaagatccaggggccgtacaataccaattgatgggaatttttttacatatacaagacatga

SEQ ID NO: 2482 - DNA, 495 bp, homo sapiens
tcacatttcagaaggcaaataattctttcagaagaagctacatgtcaagttttctatgggtagtattaatactaatatgatttagcttatgtttaaaaaaatcaagaaaagaaaaattttgtctttaaaatctactatattagtgactgtaaggagatgcttagctattgaagagcttctctccactcttgtattttctttatgagttcttctgagagattttcactgtgactgttttgacctctgtatattcatggaaaccgtactctcccagttctcttccatttccagacatcttgaatccaccaaaggggcactgggcacttaccacgccatagcaattcacccacactgttcctgcctgcagagcagaggagattgttatggctttatcaatgtctttggtaaacactcctgctgataagccatagaaagtattgtttgctcttttgatcacgtcatctaaagatttaaacttcatggatttggctgcac

SEQ ID NO: 2483 - DNA, 258 bp, homo sapiens
ggaggtgcctcagccatggcatggatccctctcttcctcggcgtccttgcttactgcacaggatccatggactcctttgaattgactcaggcaccgtcaacgtccgtgtccccaggacagacagccaccatctcctgctctggcgagaaggtgggaagtaaattcttttcgtggtatcaacagaaggaaggccagtcccctgtcgtaatcatctatcagaatgggaagcggccctcagagattgctgaccgattctct

SEQ ID NO: 2484 - DNA, 358 bp, homo sapiens
gtgcagggagaagggcttgatgccttggggtgggaggagagacccctcccctgggatcctgcagctctagtctcccgtggtggggggtgagggttgagaacctatgaacattctgtaggggccactgtcttctccacggtgctcccttcatgcgtgacctggcagctgtagcttctgtgggacttccactgctcaggcgtcaggctcagatagctgctggccgcgtacttgttgttgctttgtttggagggtgtggtggtctccactcccgccttgacggggctgctatctgccttccaggccactgtcacggctcccgggtagaagtcacttatgagacacaccagtgtggccttgt

SEQ ID NO: 2485 - DNA, 539 bp, homo sapiens
  misc_feature (517)..(517): n=unknown
aacccctgtaggctttttgtcccaagcagattgcgtgcgtgcgcctgtgtgtgagaataagtgccttactttgctgtgtggttttcaacttgtactccgtggccagcccccagttgccagggctcgacggcagccaaggacaccatacctcaggatagttatatataaaagggacacggattgtgacagtttcaccccatttgtttctaaccccgctgcccaggattagggtctgtggtgtggtctgttttgtttttggtttctcccttgtgtcagttctcttctggcccagctgggtggctgtggaagtctgtgaggtggcccaaccacaagcatacctattaagagaagcccagagcttccagcccccacttcgaaaatctcctctggccccacatagcaaactccttctccgttattttccccacccccagattttttttaaaaggcccacttgccgtaactcttttggtcattttgcttcccattcaagcccaaaagtttatatgataaaggnggttacttttacttcccagtct

SEQ ID NO: 2486 - DNA, 524 bp, homo sapiens
  misc_feature (406)..(458): n=unknown
aaagatgagctggaggaccgcaataggggtaggtcccctgtggaaaaagggtcagaggccaaaggatgggagggggtcaggctggaactgaggagcaggtgggggcacttctccctctaacactctcccctgttgaagctctttgtgacgggcgagctcaggccctgatgggtgacttcgcaggcgtagactttgtgtttctcgtagtctgctttgctcagcgtcagggtgctgctgaggctgtaggtgctgtccttgctgtcctgctctgtgacactctcctgggagttacccgattggagggcgttatccaccttccactgtactttggcctctctgggatagaagttattcagcaggcacacaacagaggcagttccagatttcaactgctcatcagatggcnggaagatgaagacagattgtgcaaccacagttcgtttgatctccaccttgtncccttgccaaaagtgtacgggggtgaactaccataactgctgacagtaatatactgctaaatcttc

SEQ ID NO: 2487 - DNA, 355 bp, homo sapiens
  misc_feature (15)..(106): n=unknown
  misc_feature (300)..(350): n=unknown
cgccgccaccgtaangctaggccgcgagcttagtcctgggagccgcctccgtcgccgccgtcagagccgccctatcagattatcttaacaagaaaaccaactgganaaaaaaatgaaattccttatcttcgcatttttcggtggtgttcacttttatccctgtgctctgggaaagctatatgcaagaatggcatctctaagaggacttttgaagaaataaaagaagaaatagccagctgtggagatgttgctaaagcaatcatcaacctagctgtttatggtaaagccccagaacagatnctatgagcgattggcactttctggttgatactgttggaccccagactgantggct

SEQ ID NO: 2488 - DNA, 115 bp, homo sapiens
  misc_feature (77)..(113): n=unknown
agtggaaacaatgtttttaagaggtgatataaagaaatgcccccactgtaatccctaccatatgttgattctatgtngtaggggtnacagtngggnnattnctttntntnggntc

SEQ ID NO: 2489 - DNA, 362 bp, homo sapiens
  misc_feature (185)..(185): n=unknown
  misc_feature (312)..(318): n=unknown
cacccagcgaggctggcctgcacgagatggacatccgctatgacaacatgcacatcccaggaagccccttgcagttctatgtggattacgtcaactgtggccatgtcactgcctatgggcctggcctcacccatggagtagtgaacaagcctgccaccttcaccgtcaacaccaaggatgcaggngaggggggcctgtctctggccattgagggcccgtccaaagcagaaatcagctgcactgacaaccaggatgggacatgcagcgtgtcctacctgcctgtgctgccgggggactacagcattctagtcnagtacnatgaacagcacgttccaggcagccccttcactgctcgggtcaca

SEQ ID NO: 2490 - DNA, 258 bp, homo sapiens
  misc_feature (136)..(251): n=unknown
tgggtggttgtgtacaggacccccatccctcacccctcccagaaccaaagaagacaagcagcgccaccaaatggctccctctgcccaagtgaaagccgagaggtcagcggctggctggggaggcaggtgagcgcanacggcacagggcaggggcngntgnngtganangnngnnngncnnnncngnctggncnggggttgatgggnagatggcggngntncttgggtagcngggtaggnttggnggntgnnggttggt

SEQ ID NO: 2491 - DNA, 435 bp, homo sapiens
  misc_feature (118)..(118): n=unknown
  misc_feature (261)..(374): n=unknown
tgcgatcaatgtatgtagcatgtctttgtcttgtgctaagtggggattattaaccacttagaatataaaattgtacaacaatttcacttgtttatttgcattttgttttttataactnttactcccttttcccctcaaaggagaactgtgtttatgaaactgtagttttgcctttggatgaaagggcatttgagaagactttaacaccaatcatacaagaatattttgagcatggagatactaatgaagttgcggaaatgntaagagatttaaatcttggtgaaatgaaaagtggagtaccagtgttggcagtatnnttagcattggaggggaaggctagtcatagagagatgacatctaagcttctttctganctttgtgggacagtaatgagcacaactggatgtggaaaaaatcattgataaattgttgaaa

SEQ ID NO: 2492 - DNA, 126 bp, homo sapiens
  misc_feature (6)..(119): n=unknown
aatatntncncatanattaggtaaatgtnaagnnttgggtctntggagtataantttttgtaanantagncattatttggtaacagaatntnaggatgatggaatgatgcgaaggtatnacacatt

SEQ ID NO: 2493 - DNA, 347 bp, homo sapiens
  misc_feature (171)..(219): n=unknown
atgaatgattacgcagggcagcatgaagttatctccgagaacatggcatcacagatcattgtggacttggcacgctatgttcaggaactgaaacaggagaggaaatcaaactttcacgatggccgtaaagcacagcagcacatcgagacttgctggaagcagcttgaatcnagtaaaaggcgatttgaacgcgattgcaaagaggcggacagggcgcanagtactttgagaaaatggacgctgacatcaatgtcacaaaagcggatgttgaaaaggcccgacaacaagctcaaatacgtcaccaaatggcagaggacagcaaagcagattactcatccattctccag

SEQ ID NO: 2494 - DNA, 359 bp, homo sapiens
  misc_feature (247)..(322): n=unknown
gagggaaacagattcagcagcggcacagctggagaaggtcgtggagcagcaccttgcctgcagggtgttctgagaatcagccatgtcatccctgtacccatctctagaggacctaaaagtggaccaagccattcaggcccaggtcagagcctcacccaagatgccagccctgccagtccaggcaacagccatttccccaccaccagttttgtacccaaacttggcagaactggaaaattatatgggnctttccctctncagccaagaagtccaggagagcctgcttcagattccagagggtgacagtacancggtctcgggncccgggcccggccagatggtggcaccggtaaccgggt

SEQ ID NO: 2495 - DNA, 582 bp, homo sapiens
  misc_feature (210)..(287): n=unknown
gacaacttatgcagtctgtgacaaagagcaagtcaagccaaggaaaaagctctcacaaagaacgtagctctgttctcttaaaatgtgtaactgttttcctggtagagcaaaatttcttgaaaggggcccagttgcgactttaagcagcgtttaaacagcctgcctccgtgtccagcatttaaatcagcacaagagaatcggctgcctgtnggccctgcctgagcctcagcctagcttggagtctgaggctccaaggaggcctgtgtgtataagccatcccatggtcnccctcctggacacgcccccctcatggcagcccccaccttaagcagcaggccggctgcaacccatcatccaagggtggttgccctttgctgcaggagggcgggaagccccccctgcctgccctgccctccagtggcttcaggcatctgggatggagtggtccatggtgtggtggagcaggactggaggcaactttttgaccatgtgctcgtagatcacactggggatgatggtcagggtgacaacgttcccagccgtggccagaatctccatgatctttttgtccttcagcccgat

SEQ ID NO: 2496 - DNA, 506 bp, homo sapiens
  misc_feature (140)..(140): n=unknown
gaacactgttgctcttggtggacgggcccagaggaattcagagttaaaccttgagtgcctgcgtccgtgagaattcagcatggaatgtctctactatttcctgggatttctgctcctggctgcaagattgccacttgatnccgccaaacgatttcatgatgtgctgggcaatgaaagaccttctgcttacatgagggagcacaatcaattaaatggctggtcttctgatgaaaatgactggaatgaaaaactctacccagtgtggaagcggggagacatgaggtggaaaaactcctggaagggaggccgtgtgcaggcggtcctgaccagtgactcaccagccctcgtgggtcaaatataacatttgcggtgaacctgatattccctagatgccaaaaggaagatgccaatggcaacatagtctatgagaagaactgcagaaatgaggctggtttatctgctgatccgtatgtttacaactggacagcatggtccagaggacatga

SEQ ID NO: 2497 - DNA, 558 bp, homo sapiens
  misc_feature (170)..(231): n=unknown
aatgtcatgtctaacatatagtagatggttttagttacaaacagaggtgaaatccttactgatcaagttgccatgaaaaaccagggacctcatctttggaaagtcttaatatatgatttcaaatatgtgcagcgactgtacaaaaatttggaaatatacacaagagtgtnnnnnnnnnnnnnnnnnnnnnnnnnnnnnnnnnnnnnnnnnnnnnnnnnnnnnnnnnnnnnntatgaatatcattccttcactcagccaagcaaagtaggttgtcaccaaaatactcccacccatttatgagagtagtattttttctgagtctagcaagtgtgcacatcataccacaggcttgggcctgttattgttccatcaggagttcatgagtgtgtattgaagtgggattcagttagcttggaacatgatcttagaaactggactacattggctttatgcatacagttacatggaaagctgaaagtatcccgcctcttcttgcagttaacctgggttaggctctaatcaatagcagcttctctccttactctcgggacacagtgt

SEQ ID NO: 2498 - DNA, 514 bp, homo sapiens
  misc_feature (66)..(66): n=unknown
gctgtgggtagagaagacaggactcaggacaatctccagcatggccagcttccctctcctcctcancctcctcactcactgtgcagggtcctgggcccagtctgtgctgactcagccaccctcggcgtctgggacccccgggcagagggtcaccatctcttgttctggaagcaactccaacatcggagaagatactgtgaattggtttcggcagctcccaggaacggcccccgaactcctcatctatagcactaatcagcggccctctcgggtccctgaccgattctctggctccaagtctggcacctcagcctccctgaccatcagcgggctccagtctggagatgaggctgattattactgtgcagcgtgggataacagccttttttgggtgttcggcggagggaccaagctgaccgtcctgggtcagcccaaggctgccccctcggtcatctgttcccaccctcctctgaggagttcaagccaacaaggcacactggtgtgtctcataagt

SEQ ID NO: 2499 - DNA, 523 bp, homo sapiens
  misc_feature (21)..(21): n=unknown
  misc_feature (179)..(198): n=unknown
  misc_feature (434)..(471): n=unknown
gtgcagggagaagggcttgangccttggggtgggaggagagacccctcccctgggatcctgcagctctagtctcccgtggtggggggtgagggatgagaacctatgaacattctgtaggggccactgtcttctccacggtgctcccttcatgcgtgacctggcagctgtagcttttgtnggacttccactgctcaggngtcaggctcaggtagctgctggccgcgtacttgttgttgctttgtttggagggtgtggtggtctccactcccgccttgacggggctgctatctgccttccaggccactgtcacggctcccgggtagaagtcacttatgagacacaccagtgtggccttgttggcttgaagctcctcagaggagggtgggaacagagtgaccgagggggcagccttgggctgacccaggacggtcanttggtccctccgccgaacacccaaaaaaggtgttatnccacgctgcacagtaataatcagcctcatctcaagacttggagcccgctgat

SEQ ID NO: 2500 - DNA, 462 bp, homo sapiens
  misc_feature (94)..(94): n=unknown
  misc_feature (400)..(448): n=unknown
ctttgctagaacgaatcagacattggtatcatctggtatcccaaagcttcagggtctgtcatccctttctatagacgggcaccttgatcacggntccagtcttagaaatcatctccagtacctaaaaccattgtttcacattagaatactgagtctagggatctagaaaatactgagtctagggatctagaaaaataagcctcaagatttgggcacatcctagcttgtatttcctggggcaggtcatcagttcagaagcatttccagatcctggctcctttcaggttagggtcaattcattgcatgaaatgggaatctcttagaggccaatgcctgcttttgcttctttagtctcaaatgtagtatgagaaactctaaaaaaaggtaaagcatggttgcntattatgttcagttggagagtagggtatacagttagttcatgttgganaggttagatgaaca

SEQ ID NO: 2501 - DNA, 328 bp, homo sapiens
  misc_feature (34)..(71): n=unknown
  misc_feature (291)..(291): n=unknown
cagtttgaggaaaccttaaacaataagtacacangacatgccccatggggcattccatagcagagacagantcctgtatgttttattccagaggcattgcatggtgataataaaatgataggaaatagaggaaaatagatacaggaaaaggcaatagacagggaagccagctagatgttagagtatggagcaatcgaggaggcataaccactcttggggtggctatagggctggaaaatgctgaagatgactgctttcactgaggtcaaggattgtaatattgccagcttngtaaagccattaaagcagaagttttcttcagtgatct

SEQ ID NO: 2502 - DNA, 284 bp, homo sapiens
  misc_feature (266)..(266): n=unknown
agcagctgccgaagtcagttccttgtggagccggagctgggcgcggattcgcgaggcaccgaggcactcagaggaggcgccatgtcagaaccggctggggatgtccgtcagaacccatgcggcagaaggcctgccgccgcctcttcggcccagtggacagcgagcagctgagccgcgactgtgatgcgctaatggcgggctgcatccaggaggcccgtgagcgatggaacttcgactttgtcaccgagacaccactggaaggtganttcgcctgggaacgtgtg

SEQ ID NO: 2503 - DNA, 382 bp, homo sapiens
  misc_feature (73)..(371): n=unknown
gggaaccaggacacatggggagccgagagaaaacagtccaggccagtatgttacaggagctggaaggtgtttngggtcagaccccaatactccaagtacactaancacttcagtgcctccaggggctcaacgtnantgccaggaaagacaactactcccagcnccatatgagcncacgtggcatgccctgtccatagcctctactgcnaccatcttaaaatgtctgactccttgttccgctgctaatcaaagtgcaatgaactggggngggatggggtggatnaggaaggtcgctggacgatttnaggggccantgtctccctcctagaaagattactcccccatcatatanncctaanacagagataacnccactcaaggg

SEQ ID NO: 2504 - DNA, 308 bp, homo sapiens
  misc_feature (9)..(207): n=unknown
cttcggaanattccattctgacttagaattctgagcgctggggcagaagacaaaaagaatgtgaattagcattttaaaaataggggagtctaacancaccattgcnttttattctcattacttctctttcantggcttaggatctgattgcnccctcacctctaaagtgtttccaagtagagtctggcagtattagtttcccccacnaacaaattcaggtagagaagttgtagtcgaagggaatgttgggactcctcactgcatggtccctggggtgtctggctcatccccatcatgacatgagttgg

SEQ ID NO: 2505 - DNA, 544 bp, homo sapiens
cagcaagatattgttggggttttctttttttctgtcaagtaagaaaaaaaaacacctgaaataaaaattagaaacataatctaagaaaaattggaaacaagcatttcaaggaaacaatttggaaagataaggaagagaaaacaacaagcagcatgagcagcaaaagcagcagcaacatggggggaaagctggctctgctgtgaggacagaacaatcaaagaccaacgtgcaccttgctttccataccaggctgagctgaggggtggggtaagggtgggcagtaaccatcagagaggcatgaaggtttcccaggtgggatcagctgatggctgctggctcactgtggggagagggtaggcaatggcctcctgcaaacgggcccagatccgccctcttataaggcctgccagccaagtggcagtgacggatttggcttagctggctccctcctctgtccacttgctccaatctgcagctctgcaggtcaccatcccacagtgatgagctcagcaagcagagactcatcagaacgtcagcctaagct

SEQ ID NO: 2506 - DNA, 434 bp, homo sapiens
  misc_feature (320)..(345): n=unknown
gaaaactgccattctaaggtatgatgcaagatggtagatattctgcttccttttccatatagagatgcattactataaatcaggacttggtatatccatttgttacatattttcttaatgtgggagtcaaagtgaagctacatagctaacaagtcttattcatttagtaagttggctgccctctgctgttcataatgtttcttaaacagattcgtttcctctaagagaagtttctatctccccttggcaaaacaaaatactattcttgaaaaccagaagttataataattaatgatatcattcagtgtgtaacattaganactatgaagtttaaaagagtcaganggtagttttcctgtagaaggaatagtatgtctctctaaaccagaagagaaattactgggaaatctctctccctgtcagttaccctaaaa

SEQ ID NO: 2507 - DNA, 414 bp, homo sapiens
  misc_feature (82)..(82): n=unknown
  misc_feature (223)..(223): n=unknown
  misc_feature (378)..(378): n=unknown
gtccgggacgtggagacccggggtcccggcagccgggcggcccgcgggcctagggtggggatgcaccgccgcggggtggganctggcgccatcgccaagaagaaacttgcagaggccaagtataaggagcgagggacggtcttggctgaggaccagctagcccagatgtcaaagcagttggacatgttcaagaccaacctggaggaatttgccagcaaacacnagcaggagatccggaagaatcctgagttccgtgtgcagttccaggacatgtgtgcaaccattggcgtggatccgtggcctctggaaaaggattttggtctgagatgctgggcgtgggggacttctattacgaactaggtgtccaaattatcgaantgttcctggcgtgaagcatcggaatggaggtctgat

SEQ ID NO: 2508 - DNA, 529 bp, homo sapiens
  misc_feature (502)..(502): n=unknown
actcaagcagagaagaaatccacaagtactcaccagcctcctggtctgcagagaagacagaatcaatatgagcacagcaggaaaagtaatcaaatgcaaagcagctgtgctatgggagttaaagaaacccttttccattgaggaggtagaggttgcacctcctaaggctcatgaagttcgcattaagatggtggctgcaggaatctgtcgttcagatgagcatgtggttagtggcaacctggtgaccccccttcctgtgattttaggccatgaggcagccggcatcgtggaaagtgttggagaaggggtgactacagtcaaaccaggtgataaagtcatcccgctctttactcctcagtgtggaaaatgcagaatttgtaaaaacccagaaagcaactactgcttgaaaaatgatctaggcaatcctcgggggaccctgcaggatggcaccaggaggttcacctgcagcgggaagcccatccaccacttcgtcggcgtcaanaccttctccagtacacggtggtggatg

SEQ ID NO: 2509 - DNA, 596 bp, homo sapiens
  misc_feature (201)..(260): n=unknown
gttgatgttcaacactttatttagttctcatttggattttaaacatttgcttgacaaataatttcccatcaatttccatttctttggaaagctcccacgtgtaatttatttttaacatctctgaagagcagaattaatgatatttcctagctgttgctccagatcatgtagggtagaggaggctgaaaactgctacaaggnaaggcatctgtattgtttcaaaacgtcaggacggtacggatactctttccagagcgaanaggtcaaatccttcatttattttttcaaaaggtaaaatatttgttattaatgcatccagtgaaaacttcttagccataaagtcagccacaagtttggggacagattctttactcttaaagcctccaaaaatagctcctttccacgtgcgtccagtcagtagcagcatagggtttattgagaggttctgggaatcaggaggtacccctacaatgacacttgtgccacatgcctcatgacaacataacagggaagccatcatggtgtcaagccgaccgatgacttcaaacgaaaaatccacacctccatcagtcatttcctttagcacttcctgaatg

SEQ ID NO: 2510 - DNA, 375 bp, homo sapiens
attttgtaaatagtattattttagctattaagctggataccttctttcaaattcagccattcagttgtaaagttgggaagaagtttcttgacaagactctgcaattaaatgcttaaaatttggaggggatccttccttgattacatcaagtatgttggtacatgggtttatacaagttcctcttgagaaggcaaaaagaccaccatgtgtgagagctctttgacttggccaataggggcctatcttaatgcacttgtttggacacatttctgatcttatttgtaaaggctgcaaaaggagaggatgaaatgctgtaaaagtaggaaatgaagtggaagctggaagaaaatgtaattggtggtacagctatgggcc

SEQ ID NO: 2511 - DNA, 483 bp, homo sapiens
  misc_feature (231)..(471): n=unknown
agtcctagcaagtttctgacagaagcacagacagaaaatggaaacaaataccttactgggaatgtttccttgcttgcactaaccttgactacagcaataacgcattgcttaacagtcaaagtgcaccaggtcatttccgcaaatggcagggtgagtgactgtgccgttcccaaggaagcaaaacagacacaaacaggtcccacgcgctgggtgtcctggctgagtacagangaggctgctagactggcagtacccttttcccaagtgangaaagccagctgtgacactctgcttgccggcaggggtccccacnntcccctccaccatctggcccatagctgtaccaccaattacattntcttccagcttccacttcatttcctactttnacagcatttcatcctctccttttgcagcctnnacaaataagntcagaaacctgtccaaacaagtncnttaagataggccccnattggccaagtc

SEQ ID NO: 2512 - DNA, 536 bp, homo sapiens
  misc_feature (217)..(217): n=unknown
  misc_feature (483)..(483): n=unknown
ggcccctgccgccggtcgggatgtccggctggagctgtcgcctccgccgccgctgctgccggtgccggttgtgagcgggtctccagtcggctcctctgggcgtctcatggcctctagcagctccctggtgcccgaccggctgcgcctgccgctctgcttcctgggtgtctttgtctgctatttttactatgggatcctgcaggaaaagatgtgagcnaccccgggggcgggccgacattctctccccagcctgtgacagggatcccgggccttctgcctctggacccgggctttcctcttgtcctcctgcccggctgtcgccctcttagcaccctactacttttgcagctatggtgagcctacccagaattccagaatccaggattattttctggattcttcggattggttattttcttttcttagctgtttttccccgcttggttctaaggggctgcgttttacaggctgagacttctaatncctcaaaacaggaacccgaattcggcccccttttggtactccccagatgcttg

SEQ ID NO: 2513 - DNA, 482 bp, homo sapiens
  misc_feature (43)..(98): n=unknown
  misc_feature (208)..(454): n=unknown
attcctattaagtccattttcccaagagatgtcactgtttganataataacttaaatattcttgatgtggaggtantctctctcttcctagtgggatntcttcttagctcctttcccaaacttggcatcaagaccaagacccaggaacacaagcacagtgcccacccactgcatggggctgatgggattggcgaagaggatcacagangccaaaattgtgaagaactttcgagttgtagtgatgatggagcaggtcaggngaccaaaatacacaaccgtcataaagatgaagctctgacccagggcactggtcagcccaaagagcaggatgttatagatgatggcanggtacctttcagcaaagctcaagaactcccagagctccccagtgaacaggattcccattcccagcagcaatgtcgaccaaaggttgatgttnagcatcatgtggttngagcctgtttgggaaattagcccgcatg

SEQ ID NO: 2514 - DNA, 458 bp, homo sapiens
  misc_feature (425)..(429): n=unknown
agctggacgtggtggacccagacgggagtgttcccgtggggctgcggcagagaaaccagacggagaaacagtccacgggtgtgtacaaccgggaggccatgctcaacttctgtgaaaaggagaccaagaaacttatgcagagggagatgtccatggatgaaagcaagcaagtggagaccaagacagatgccaagaatggagaggaaaggggcagagatgccagcaaaaaagccctgggccccagacgggactcagatctggggaaggagccaaagaggggtggtttaaagaaaagcttctctagagacagagatgaagctggtggcaagagtggcgagaagcccaaggaggagaagatcatccggggcattgacaagggccgggtcagggctgcagtggataagaaggaggcagggaaggatggnagangagaggagagggcagtggccaccaagaag

SEQ ID NO: 2515 - DNA, 532 bp, homo sapiens
  misc_feature (427)..(487): n=unknown
gtggttttcttgacttatttttttcgcattgcaggagtttgtttaatgaccgaaaattagtagaatacttaaaggagagttcttttgatgcagtgtttctggatccttttgatacctgtggcttaattgttgctaaatatttctccctcccctctgtggtcttcaccaggggaatattttgccaccatcttgaagaaggtgcacagtgccctgctcctctttcctatgtccccaatgatctcttagggttctcagatgccatgactttcaaggagagagtatggaaccacatcgtgcacttggaggaccatttattttgccagtatctttttagaaatgccctagaaatagcctctgaaattctccaaacccctgtcacggcatatgatctctacagtcacacatcaatttggttgttgcgaacggnctttgttttggactatcccaaacccgtgatgcccaacatgatctttcattggtggtatcnactgtcatcagggaaagccattgccatggaatttgaagcctacat

SEQ ID NO: 2516 - DNA, 359 bp, homo sapiens
  misc_feature (353)..(353): n=unknown
gtttcatcttactggtctggcaaagtccccggccttgggcgagcccagacctcctcagtgcctgcacacagctgcccacagccagagaaatccatttaagcagactgcctgcatccttcttaacagtgcaaggcaggcactccctgccacaagagaccctgttccctagtagggcagcttttctcctccccagaacctcctgtctatccccacccaatgtctcctcacaggcatattggggaaacaggtcaggctctcccaccgtatctgcaagtgtactggcatccatctgtcttcttcctacccctacagtagaaacagtgtctgtccccagctgtgctctgatcccggcntccttt

SEQ ID NO: 2517 - DNA, 512 bp, homo sapiens
  misc_feature (46)..(46): n=unknown
ctttttagaagctgtgcaattcgtccgacaggagaagggtcactanggttcctgggaaatgatcactggggatgaaatccagatcctgagtaacctggtgatggaggagctcctgcccactcttcagacagacctgctgcctaagatgaaggggaagaagaatgacagaaagaggacgtggcttggtctcctcgaggaggcctacaccctggttcagcatcaagtttcagaaggattaagtgccttgaaggaggaatgcagagctctgacaaagggcctggaaggaacgatccgttctgacatggatcagattgtgaactcaaagaactatttaattggaaagatcaaagcgatggtggcccagccggcggagaaaagctgcttggagagtgtgcagccattcctggcatccatcctggaggagctcatgggaccagtgagctcgggattcagtgaagtacgtgtactctttgagaaagaggtgaatgaagtcagccagaacttccagacca

SEQ ID NO: 2518 - DNA, 270 bp, homo sapiens
  misc_feature (5)..(260): n=unknown
atctncttccatcactggngcagagtccactggtacttccacggacgctgtcagcaactttctgancgccttcaaagaanccnaggcagtcatncgttctggctcttcntgggcgggttcttcntcntcannggnccctccanactccagctcttatgngcatgtgcccgngaatcgtgntcngtcctctcttgcnacaggattcancacggggtcatccactcttgaantaatnagctgctcagtggnatctnggggtngggttgggcc

SEQ ID NO: 2519 - DNA, 399 bp, homo sapiens
  misc_feature (373)..(373): n=unknown
cccacttgggtgacaggtgtgatggagtgtggaggagggcaaggaggaggaacagcctggattgctgagtgtgagcggcctggcagctggcctggccgtgcagagcctagggaggcagggcaggttctgaggtttggggtggcatgtcatcttcatgggttgatggtctgtgaagccactggcagcccagttcctcatcccttccttccccacccttagcgtctccccagcagcttgagggtgaggtggtgccaggctgcgggggcagctgctcttgcaagaggtccaggggtcagcccatggcctctgagcagccctgcccaggtctcgtccctctccacagcccagaacgatctcttcagcacatcaggcnatgagtgggtctgctgaacctcaatg

SEQ ID NO: 2520 - DNA, 395 bp, homo sapiens
  misc_feature (130)..(130): n=unknown
  misc_feature (309)..(386): n=unknown
aaaaaaatatacagatctgctgccctgttgattcctcagatttagggtctttagggaaaggtgaaagagggtacagggcggcccccagcaaggccgttcattgtccatcgagagcttctgctcatctggncctggagctgggctcccctgagatcagccccagggcactgggcgacaggtgccatgccaggcctagggcggggttggcatgaggggcaggggctgggaggtgctcaggcagcctgggtcatcaggaactagactggctcacaggcagagagaacgtgggctggagactttgtccttgangggaggacactggtgcctcgggctccaggaatggaggccctgcaccagccgctgggatggacacatgtggcaccttncatggggcc

SEQ ID NO: 2521 - DNA, 444 bp, homo sapiens
  misc_feature (264)..(284): n=unknown
  misc_feature (398)..(427): n=unknown
gggaggaggcgccgctgagacccttctgctgagagctctgccctcccctcatcacctggcctgtgcagaaacgctcatgcacacctggctgcacaggtgtgcacgcattacccttcgcgtgtacgttcccatgtgccccgtgaaagcatgtgtggctgcagacgtgtccacatgggccttgcgaacctgggttagaaaccctggccaggcgaacgtggggtgattcacagcacaaaagacctcaccaccacacctgcactcacnccaccttgcatgcaccttgntacctgcttgcggctttcagcggagggcaggggtctggcacaggtgcgatggcaccccatgtccaggcatacagatgtggtttctcggctgcaccgggccaggctgcgggtgtnaggcgtctgtaagttntgtgatgtatcanacagctttgagacgtct

SEQ ID NO: 2522 - DNA, 115 bp, homo sapiens
  misc_feature (10)..(114): n=unknown
tgcatagacnannctattagcactataannnagggtatgagagaattcntcattatanatgggtagaattcacccnagaaaccaaagaacttttcatnattacaaggganggnna

SEQ ID NO: 2523 - DNA, 505 bp, homo sapiens
  misc_feature (49)..(49): n=unknown
  misc_feature (181)..(181): n=unknown
tttttacctgcctcctggtgatatttgctgctgaagttaccactggagnatttgcttttataggcaagggggtagctatccgacatgttcagaccatgtatgaagaggcttacaatgattaccttaaagacaggggaaaaggcaatgggacactcatcaccttccactcaacatttcagtnctgtggaaaagaaagctccgaacaggtccaacctacatgcccaaaggagcttctaggacacaagaattgcatcgatgaaattgagaccataatcagtgttaagctccagctcattggaattgtcggtattggaattgcaggtctgacgatctttggcatgatattcagcatggtcctctgctgtgcgatacgaaactcacgagatgtgatatgaagctacttctacatgaaaattgcaatctaaagctttcataccaaatgtcacaggagctgtctcccagctcattttaacactgaaatgacattaggatctaaaataatttg

SEQ ID NO: 2524 - DNA, 610 bp, homo sapiens
gaacattatttttgttctgtgtatatataagtatttttgtttccttaacttgtttctgttgcccacacacaactaggagaagatgcttttctttattttggtttggccaaagatgctaatggttaaattatgaaggactttgttttacttatgttaagtggtgaaaactgtagttcttaatctatgaagaattctctaggtggctatacaagaaaaatacaaaaagttaggaaaacatgtaaacgtaagttatgaggtatttcacagatacagtgcccatacaaattctctttcccacaattttcaactgccagatctcttgctttagtcttttttccttatatttggagaaacagaagagtttgacataaaagtccctttgaggatgtgagggttgcagtagtttacagcagggtcagaaaatgaaagtaataaagcaatatttacatgtttttgtataagaacaaaaatatttccttaaaaagttgttaaaagttttttagtcctataaacactcacttttatagggcacatgattgtctgtgtgacttctctttccagaggaagacttttttatttttaaattctaggaaagcatgacttattccaa

SEQ ID NO: 2525 - DNA, 422 bp, homo sapiens
  misc_feature (5)..(177): n=unknown
gaggnccctgcngccgccgctctcgctgctgtcgccgcgcagagccnggagcaggagccacggccgagaggagnnnnnnnnnnnnnnnnnnnnnnnnnnnnnnnnaggaggtggaggaggcgccggaccggggggatcgtcagtatttaaacagatcacatcatgcgtgagtacaanctagtggtccttggttcaggaggcgttgggaagtctgctctgacagttcagtttgttcagggaatttttgttgaaaaatatgacccaacgatagaagattcctacagaaagcaagttgaagtcgattgccaacagtgtatgctcgaaatcctggatactgcagggacagagcaatttacagcaatgagggatttgtatatgaagaacggccaaggttttgcactagtatattctattacagctca

SEQ ID NO: 2526 - DNA, 351 bp, homo sapiens
  misc_feature (319)..(346): n=unknown
ttaatctgacagtaaaacacaagaagcaatattagagttggtttagtatattatatattttagctttgaaagccatagaaatcagttatcccagtttttttcctataaaagacccatttttccaaagcattatgcacaattttaattagaatataatgacagatgatattccataattttttaaatataaaatgaagtcaatgactcaaaaaagttatctgctgcaatgagtttgaggggacatttcataatcagtatcattacagatataaagtataatggttcaactttttagtgcttgatagggaggatcatgatnaaaagatcaantatgaaatcatttganttata

SEQ ID NO: 2527 - DNA, 247 bp, homo sapiens
  misc_feature (47)..(47): n=unknown
  misc_feature (203)..(243): n=unknown
agatagggaaccagcctctctctcatttcagcaaagctctgagattngctccagtgttatctgcatttggctatgctgagccaatcacagctggccaatcatatacaatgctctgattagtcaggcctaagtcacatgctcttgtctggaggtggaaatagtttgcctggaccacacggagtagatgaggaagaagggtgttncccaaggaaaagccaagttntggntncagaanaagggannaaga

SEQ ID NO: 2528 - DNA, 368 bp, homo sapiens
  misc_feature (43)..(45): n=unknown
agctccagagcactcacgggctgccagggtgagcaggctaganantcacgacaccaggtagctctgcaggtgctgggagggcaatcagcccagaggaagagcaggctggggagccctcaccgcccaatggggactgacccctggcccctgcccctctccaccccactgccctgaagccagatttcctgctcagcatggacaggacagcaagaggctaaccctctgcccaggtggaagctgaccccaagccacccttcacctggacaggatgagagtgtcaggtgtgcttcgcctcctggccctcatctttgccatagtcacgacatggatgtttattcgaagctacatgagttcagcatgaaaaccat

SEQ ID NO: 2529 - DNA, 484 bp, homo sapiens
  misc_feature (135)..(210): n=unknown
gtccttcctcaggaccagccgtcagcagtccctgacgaaagcaccccattctctccacagacagctggttccagaaggaccctctgaggctggtcttccgggtaggatgtgctgtgggagggttctgtttccgangaggagaggcgcgacacagcgtgcaaggacctgcagcaccttccacgcagcacnccctgctcctcctcctcagcncctgccgggctctgactcctaagtcaggcaggagcttcttcaggcccctggctgaggaagagccacagccaccctaaaatggcttcgggggcatgcagccctccatctccagcagctctggccatccctcgtatttgtttgtgtctgggctgttctttaagaactgctcaaaggggcttttacccctgaggtctttggctcctatgaagacccagctgtcccggaagcccagttgttttgcgtaggaactccccaagtcagagaagagtttcct

SEQ ID NO: 2530 - DNA, 433 bp, homo sapiens
  misc_feature (51)..(51): n=unknown
  misc_feature (401)..(401): n=unknown
cgtgtttacagttagctttcagctggacacagagttccactgctgggtacnaacacctgaaagcctccagttggctccagtctgttcctgatggttaaaaaaccttagtcctgagttggaaatccttgcctaggagtccagggcagcttagtgaccacagccaccggcccatccctgcctccagtgtccctggactccaagaacctttcagagtcattgagggcacatggggggagacctgtgagtccctaggtcaaccctgatgctgccgtggagagagccctcctcacctggacactcctgcccacgtcttgtgtagtgacctattgggttgctgcacagagcagagacgatgacgtgcactgaggagaagttgttgaggcttaagcactcctggaganggaagaatgagctgtgcggttcagagttggag

SEQ ID NO: 2531 - DNA, 173 bp, homo sapiens
  misc_feature (7)..(161): n=unknown
tctatangggctgaatggnttngtatgcaganananacgcctcccctgggatcctgcagctccaggcccctgtgggtggggtgggggctngaaccnatgaacattctgcaggggncactgacttctccacggtnctcccttcttgcanaacctngcagctntagccttgcggg

SEQ ID NO: 2532 - DNA, 305 bp, homo sapiens
  misc_feature (53)..(303): n=unknown
ggtaaattgacaagaagtatttattgtttttccatattgctttattgccttcnttggggataaaccaattcctatccttttttatatgtgtaagtnaagcctgaagtgtagggggcctttgttcttggagcngccagggtctccttgccctggccttggccttccctagactgtgtggggctcagcattgggannggttgcacatgtcccaacctttggcccccttacttttcancaagccaggggcccancagtcagctcccaggatgtgtggggagctgtccctgantctgcaggcctgancg

SEQ ID NO: 2533 - DNA, 319 bp, homo sapiens
  misc_feature (240)..(240): n=unknown
ttgcaaagaaacaaagcagctgtacaggagtggggacgcgtcagtgtacaatacattcatgtccaggataaggagcatacaccaggatttatacacggtggcagcggctataggcacgatgatacaaaatataaagaatatttccatctatataaatacacagctggggtggggaaggatgctgggtgatcttgtttcccccgcagagggcctgggaggcagggagggtggtgggaaggnatttcttacatttgttctcaatgatgggtctgaagggaggagagaaatggggaaacacagcctgcacacactgatgtgc

SEQ ID NO: 2534 - DNA, 433 bp, homo sapiens
  misc_feature (32)..(53): n=unknown
  misc_feature (205)..(428): n=unknown
agacgccagacccgctcagaccctcctgccangtgacagccgccaagatgggntcttgggccctgctgtggcctcccctgctgttcaccgggctgctcgtccgacccccggggaccatggcccaggcccagtactgctctgtgaacaaggacatctttaaagtagaggagaacacaaatgtcaccgagccgctggtggacatccncgtcccngagggccaggaggtgaccctcggagccttgtccaccccctttgcatttcggatccagggaaaccagctgtttctcaacgtgactcctgattacgaggaagaagtcactgcttgaggctcactgctgtgtcagagcggaggcacattggtgacccagctaaagggtgttcgngtnagtnntggacgtcaatganaatgncccccganttcccctttnaagac

SEQ ID NO: 2535 - DNA, 377 bp, homo sapiens
aaactgacaagtcaaggcaggaagatgttgccatcacaactcattgggtttctgctgctctgggttccagcctccaggggtgaaattgtgctgactcagtctccagactttctgtctgtgactccaaaggagaaagtcaccatcacctgccgggccagtcagaccattggtactaccttacactggtaccagcaaaaaccatatcagtctccaaagctcctcatcaaatatgcttcccagtccttctcaggggtcccctcgaggttcagtggcagtggatctgggacagctttcaccctcaccatcaatagcctggaagctgaagatgctgcaacgtattactgtcatcagagtagtactttaccgtggacgttcgg

SEQ ID NO: 2536 - DNA, 485 bp, homo sapiens
  misc_feature (470)..(470): n=unknown
agcataattaaagccaaggaggaggaggggggtgaggtgaaagatgagctggaggaccgcaataggggtaggtcccctgtggaaaaagggtcagaggccaaaggatgggagggggtcaggctggaactgaggagcaggtgggggcacttctccctctaacactctcccctgttgaagctctttgtgacgggcgagctcaggccctgatgggtgacttcgcaggcgtagactttgtgtttctcgtagtctgctttgctcagcgtcagggtgctgctgaggctgtaggtgctgtccttgctgtcctgctctgtgacactctcctgggagttacccgattggagggcgttatccaccttccactgtactttggcctctctgggatagaagttattcagcaggcacacaacagaggcagttccagatttcaactgctcatcagatggcgggaagatgaagacagatggtgcaancacagtttcgcttga

SEQ ID NO: 2537 - DNA, 277 bp, homo sapiens
  misc_feature (121)..(270): n=unknown
tgtctccaaattaacaaaaaaattattaacataatttatttgagtcatacaatacatagagtatttcaagtgaattaaaatactataacaatgtaagagaatgtttataaaaatggaaganaganatagaaaaaccacccatactactaccatcgcaatgtaaatttctttttcatattccttcacagtaatttttccaattatgtaatttgtatnacactctggncataacgtatccataaagtggttatgttgttgtttttgagaccncattttt

SEQ ID NO: 2538 - DNA, 511 bp, homo sapiens
attgaataaaatcagcttgggagaaaattagttgcttgctaaatcatggaaaacaacaatatctttttgaacaatatatcccacagaatgttgtagagttcaatgcgaacttcagtccaggtcaacgtcccttggcttatgctctctcataaactctcgtggaagtgacgcctttcatgacgcattcctagacacaaaaaacaattcttggtcaatcactggattaaaccatggatttatttattgtctctctgaatgttgggaataaaacaatattcattccaaagatattcatttctggactcctatatatgtaacccatatattgtaataagatagggagatataaagaccaggaaaatacaagttttcccctccaggtgccttaaaatctgtatggtgactgagaaacataagcagagataggtaatacaatatggtggaggtaccactggagacagccttaggatgcctggaagcaggcagagaatgcttcctagaagacagcatg

SEQ ID NO: 2539 - DNA, 441 bp, homo sapiens
gcctggagtgttattttaagaaagcagaagcaccatcatttgcacactccttatagatcacacaccttaaccctgactttttttgctccagtttttcagaagaagtgaagtcaagatgaagaaccatttgcttttctggggagtcctggcggtttttattaaggctgttcatgtgaaagcccaagaagatgaaaggattgttcttgttgacaacaaatgtaagtgtgcccggattacttccaggatcatccgttcttccgaagatcctaatgaggacattgtggagagaaacatccgaattattgttcctctgaacaacagggagaatatctctgatcccacctcaccattgagaaccagatttgtgtacccatttgtctgacctctgtaaaaaatgtgatcctacagaagtggagctggataatcagatagttactgcta

SEQ ID NO: 2540 - DNA, 349 bp, homo sapiens
  misc_feature (209)..(239): n=unknown
aaatagtcacattgttatctttattaggtaatcacttcttaattatatgttcatactctaagtatcaaaatcttccaattatcatgctcacctgaaagaggtatgctctcttaggaatacagtttctagcattaaacaaataaacaaggggagaaaataaaactcaaggagtgaaaatcaggaggtgtaataaaatgttcctcgcattnnnnnnnnnnnnnnnnnnnnnnnnnnnnnnngccttggagagccagagcttccgcattttctttactattctttttaaaaaaagtttcactgtgtagagaacatatatgcataaacataggtcaattatatgtctccatta

SEQ ID NO: 2541 - DNA, 360 bp, homo sapiens
  misc_feature (142)..(142): n=unknown
atggcctctccatctgcccacttttccaaagggtcatcttgggttttcccctctcctgcagtggactcagtgtcgcctgccaggagaagtgccactgctgctcctctcttctggcccacaattgtccgtgcctgggctacantgacagccacctgattcatttccctacctctccagtctagtctccacaccacagcgaaggcaatctttagaaaatctttataaaacctccagctcaaaattttctctggctcttcactgtccttcgagcaaaatctgaaaccctgagcataatttatggaagacctgtgaccgggctccagctgacctctccaggctcatctctcctcccaacctccc

SEQ ID NO: 2542 - DNA, 523 bp, homo sapiens
  misc_feature (62)..(62): n=unknown
  misc_feature (204)..(204): n=unknown
  misc_feature (372)..(519): n=unknown
gtcctgcagcttcttcttcgagtcggagagctacaaggacagcgtccagggtagggtgaganggggaccatgagtggcccctgtccctggccccacagactctgagaagcgaagaccatgtctcctcgttggagaaacccaatagcaggggaagctggggggtcaagcaccatcgcaccaacactccaccgcgatctgcctgcnggggatctcagcgcagagaagttgagaggacccatgaaggaagcaaggacacggggcaggcacctggatgttgagagtggagatgtggcgctccaggttctgcttggcctccatctcctcgtccagctggtcttgcaggctgttccgctcctcctccagctggcgcanttcgtagacacgttgagcttctgcngggtttcttcttgaagcagctcctgcaaaagggatgcaaagangtcccagggacctgcccccgagggaaggccacccccccaggttcccctggatgatgtggcaggacactcactgggtgtnctgg

SEQ ID NO: 2543 - DNA, 567 bp, homo sapiens
  misc_feature (355)..(566): n=unknown
gaacacctcaagtactagcccatgtgttttgagtaaaaagggctcctttcaacgaggatccccttctagaggctttgactaaccagtctcttggcacccttagaatgaagttgagagcgtcacagggatgcttaacgaggccgaggggaaggccattaagctggccaaggacgtggcgtccctcagttcccagctccaggacacccaggtgagtgtcctgccacatcatccaggggacctggggggtggccttcctcggggcaggtccctgggacctctttgcatcccttttgcaggagctgcttcaagaagaaacccggcagaagctcaacgtgtctacgaagctgcgccactngaggaggagcggaacagcctgcaagaccagctgggacganganattgangncaagcagaacctggagcgccacatctccactctcaacatccaggtggctgccccgtgtccttgcttccttcatgggtcctctcaanctttctctggcgttgagattccccccgcaaggcaagattcgcggtggaagtgttnggtgccatggtgcttgaanc

SEQ ID NO: 2544 - DNA, 382 bp, homo sapiens
  misc_feature (247)..(326): n=unknown
gtacacacatcaggaataagatgtagagcccattatcactacttctttttaattgtttgagaatagtggatgagaaaaataagttaaaaaatattttctgcaagcaatatgattataaacttggaaaacccaagaggttcaactgaaaaattactgcaaataagtaaattaattaaaatagcagaaaaccataccctttgtatagccacacacacatacgcagggaatagaagatataacagaaganaacactcttttcacaatntcaatgagaagacaagcccaggaatgaatttaagaagatgtagaaaatcccatatgaggnngtcattccaaagcactacggaggatacaaaggtttgtgaatgggaagacgtatctt

SEQ ID NO: 2545 - DNA, 328 bp, homo sapiens
  misc_feature (2)..(2): n=unknown
  misc_feature (101)..(328): n=unknown
cntgataacaagcttggctgagcagagggaactaggggtcggcagaaaggattatgggtggaaaacattggctcttccttggggagtgatgctggggaaanggaaganngtggctcagcntncaggtaaataggctagaaaagccaaggccaaangctngnngggagangacantcagcatgtccancctnaggtctgggtgtagggttatcccttctccctgtgccttcccatctcgtncatgagcctagntcttagagccttgtgntggaggctgctgtgatnnccngaaccgggatctgtcnagcntttggccacnncctgggan

SEQ ID NO: 2546 - DNA, 455 bp, homo sapiens
  misc_feature (278)..(360): n=unknown
ccgggattggctgcgggcctcgcgaccctcctgcttccctccccgccccgcgccgcctctctggtttgtgcgcccgtcgcaggtcgcaggcctctttgtcagctggagttgcgcgggctgacgcgccactatgtagcgggtttcgggcgggccacgcgtgcgggacaggaacccaaccccagccgaccttgagctccaggagttcgtctcttacgtctgcggaagtgcagctgcctcagttcttagcgcaggttgacaactacaggcacaagccattnaagctggaatgtcctgttgctggtatttcaattgacttaagccaactatcccttcagttacaataggaaagtgcctctaatnaggccaaatatgcgtactaacttgtagcaaccacgtgtccgtgcagtgcacaagagtagagcagtgacaatgctggtggcaacagggcagtgtag

SEQ ID NO: 2547 - DNA, 441 bp, homo sapiens
  misc_feature (367)..(367): n=unknown
cggaggtggcagccctgagcttacaaaatgaggggtttatatgggggagagagaccctggggttgttagtcaattaactttaccacatataatctcatgaccggcttacaatatattatcttgtgaaaataggaatttacaagggggtgtaatccacgtttctcatgacctcccccgtgccacccagagggcttcggtgtagcaagtctggtgaccttgctatagcgcctagataacggttcaggaatgcagctgcagagtattcagggtaagggtcagctgcattgagttagcgggggcggagtggtcctggggcagcctgtccctaacagaatccacctccgagttgtgacaattaaatgaaaangttgaaaaggtgaacatgaagcacctgctacactgccctgttgccaacagcattgtcactgctctagctcctgt

SEQ ID NO: 2548 - DNA, 332 bp, homo sapiens
  misc_feature (229)..(285): n=unknown
ctcgccccgctctcagccgccgctctgccccgcagcagccagccccgtgtccggcagtatgttcagctgggtcagcaaggatgcccgccgcaagaaggagccggagctcttccagacggtggccgaggggctgcggcagtgtacgcgcagaagctgctacccctggaggagcactaccgcttccacgagttccactcgcccgcgctggaggacgctgacttcgacaacnagctatggtgctcctcgtggggcagtaacagcaacgggcaaagaccaacttcatnngacaacctgatcgagcaggacttcccggggatgcgcatcgggcccga

SEQ ID NO: 2549 - DNA, 266 bp, homo sapiens
  misc_feature (103)..(103): n=unknown
cagtccccccacctacaactcagcacatgactacatcagctgggaatctttctccaacgtgagctattacactcgtattctgccctctgtgcctaaagattgncccacacccatgggaaccaaagggaagaagcagttgccagatgcccagctcctggcccgccgcttcctgctcaggaggaagttcatacctgacccccaaggcaccaacctcatgtttgccttctttgcacaacacttcacccaccagttcttcaaaacttctg

SEQ ID NO: 2550 - DNA, 485 bp, homo sapiens
cagcactgggattccgaggtgtttccattcggtgatcagcactgaacacagaggactcaccatggagttttggctgagctgggttttccttgttgctatttcaaaaggtgtccagtgtgaggtgcagctggtggagactggaggaggcttgatccagcctggggggtccctgagactctcctgtgcagcctctgggttcaccgtcagtaccagtagcagctacatgtgctgggtccgccaggccccagggaaggggctggagtgggtctcagttatttatagcggtggtaggacaagttacgcagactccgtgaagggccgattcaccatctccagagacaattccaagaacacgatgtatcttcaaatgaacggcctgcgagccgaggacacggccgtctattactgtgcgaccgatagtagcggtaattacttcggctacggtatggacgtctgggggccaagggaccacggtcaccgtctcc

SEQ ID NO: 2551 - DNA, 360 bp, homo sapiens
  misc_feature (83)..(345): n=unknown
aggctcagtagcaggtgccgtccacctccgccatgacaacagacacattgacatgggtgggtttacccgccaagcggtcgatngtcttctgtgtgaaggccagcngcagggcntcgtngcccaccatgcaggaaaaggtntcccccttcttccagtcctcggctgccacgcgcagtangctggtcacagcgaaggtggtggtgccctggctgggctcctgccgggatgcccaagtcaggtacttctcgnggggcagctcctgtnacccctgcagccagcgaaccagcacatccttggggctgaagccacgtgccaggcagtcancntcaccanctcgttcagggncagctcctccgacgg

SEQ ID NO: 2552 - DNA, 301 bp, homo sapiens
  misc_feature (14)..(44): n=unknown
  misc_feature (294)..(301): n=unknown
gcggcggcgggacngcgtcgagtgtctccgtgcgcccgtctgtngccaagcagccagcagcctagcagccagtcagcttgccgccggcggccaagcagccaaccatgctcaacttcggtgcctctctccagcagactgcggaggaaagaatggaaatgatttctgaaaggccaaaagagagtatgtattcctggaacaaaactgcagagaaaagtgattttgaagctgtagaagcacttatgtcaatgagctgcagttggaagtctgattttaagaaatacgttgaaaacaganctgttan

SEQ ID NO: 2553 - DNA, 420 bp, homo sapiens
  misc_feature (192)..(420): n=unknown
acaacaaaagaaatattgtgcaaattgtaagtcacaaggattttttttaattaaaacttttgttttccaagggtccaagttttgatgtcagaaatctacacccaatatacaaaaacaatgttaaatgggaagatatagtgacatttttcactatatattttaagcaatgtacttttgttttgccactgtgtntatcatccnctatataacagcataaaagaganatactgttaacaaaagtgaatgttctaataattncctanccacctacctccacatccccaaaaaactcctataaattaacaggacaacattcgtccacctgtgaataatggtcnctaattttctaattcaataaagcacncattatatcctcataacataaaggtatntactgatgacataagcatctttttcaan

SEQ ID NO: 2554 - DNA, 256 bp, homo sapiens
  misc_feature (178)..(189): n=unknown
gccaatataagcccctcccagactgccccatggtgctcaaggtggcggggcctgcatgtgccgtggttgggcttggggctgtgatcctggcccgctcccgggcgcaacttcagctcggtgcagggctgcagagaggtcagcagatggaccccgaccgagccttcatctgtggagaganccgccagtttncccagtgccttatctttgggtttctgttcttgacaagcggcatgctcatcagcgtcctgggcaattg

SEQ ID NO: 2555 - DNA, 539 bp, homo sapiens
  misc_feature (372)..(523): n=unknown
tagtgatccattgcatataaaactgaactagagtccatagtttacggtggggaaggctcagaagatagaggcaagaatgtagctgcagcattttctttttcttcatatctaggaggcaattcagatggaagatgtggagtgtgtgaggcctcagaagatgaattcgtcccagaaatggtatatatagattcacagtctctttcagaggctgcaccctctgaagttggggtcccatagttgaaaatactgtaatatgaaggggggttttcattcggaagcagactgttagttccaggactctcagcgaccgcagaagctacagtgacctggacaggctccataatctggatctgtccctcttctctctcagangcatcctggccagcattcagcgtgtttctcttcttaacatgggnaaccacgaagaaacacaatcccacaagcacaatcaaggggcccatgtctncagagaaaggaanccacacatcccggggtctgagtcgccantgtctgtctcgtttancgggtcctgcgcccat

SEQ ID NO: 2556 - DNA, 555 bp, homo sapiens
  misc_feature (433)..(527): n=unknown
ctcctctgtttcctgtgcagtagctcccgttgcggcggcacccgtggcagccctggcggacgcaggagcgatggcagcgaccgatatagctcgccaggtgggtgaaggttgccgaactgtccccctggctggacatgtggggtttgacagcttgcctgaccagctggtgaataagtccgtcagccagggcttctgcttcaacatcctgtgcgtgggagagacaggtttgggcatgtccaccctcatggacaccctgttcaacaccaaattcgaaggggagccagccacccacacacagccgggtgtccagctccagtctaatacctatgacctccaagagagccaacgtgaggctaaagctcacgatcgttagcacagttggctttggggaccagatcaacaagaggacagcttacaagctatcgtggaattnatcgatgcacaattcgaggctacctgcaggaagagtaaagatccgaagagtgctacanacctaccatgacttcccgaattccatgtctgcttgnattcattgcccccacgggtcattccctg

SEQ ID NO: 2557 - DNA, 521 bp, homo sapiens
  misc_feature (472)..(517): n=unknown
ggaggaagcaggaggaagccgatcgaaaactcagagaggaggaagagaagaggaggctaaaggaagagattgaaaggcgaagagcagaagctgctgagaaacgccagaagatgccagaagatggcttgtcagatgacaagaaaccattcaagtgtttcactcctaaaggttcatctctcaagatagaagagcgagcagaatttttgaataagtctgtgcagaaaagcagtggtgtcaaatcgacccatcaagcagcaatagtctccaagattgacagcagactggagcagtataccagtgcaattgagggaacaaaaagcgcaaaacctacaaagccggcagcctcggatcttcctgttcctgctgaaggtgtacgcaacatcaagagtatgtgggagaaagggaatgtgttttcatcccccactgcagcaggcacaccaaataaggaaactgctggcttgaaggtaggggnttctagccgcatcaatgatggctaactaaaaccccagtggaaacnagtc

SEQ ID NO: 2558 - DNA, 599 bp, homo sapiens
  misc_feature (541)..(541): n=unknown
aatatatgtttattggagcgatccattatcagtgaaaagtatcaagtgtttataaaatttttaggaatggcagattcacagaacatgctagtcagcttgcagttttacctcgtaaagataacagagaattatagtcaaaccagtaaacaaggaatttacttttcaaaagattaaatccaaactgaacaaaattctaccctaaaacttactccatccaaatattggaataaaagtcagcagtgatacattctcttctgaactttagattttctagaaaaatatgtaatagtgatcaggaggagctcttgttcaaaagtacaacaaagcaatgttaccttaccataggccttaattcaaactttgatccatttcactccaatgacgggagtcaatgctacctgggacacttgtatttgtaaattctgatttagcttattgtagacttgtgcctactttgtcatgagggttgacttctgcatcttcgtgggctttccttcctttgggcttagggttgctaaagctagaaggattcaattgctcnttacagacttatgaggaagatagactttggtaacgcagatggtcacttctcatggcca

SEQ ID NO: 2559 - DNA, 554 bp, homo sapiens
  misc_feature (335)..(335): n=unknown
  misc_feature (499)..(499): n=unknown
caaaacacagcattttgtcagtgcaaaaacaatgccagagctgtacgaccttgttaacagctataaacctgatctgatctggtctgatggggagtgggaatgtcctgatacttactggaactccacaaattttctttcatggctctacaatgacagccctgtcaaggatgaggtggtagtaaatgaccgatggggtcagaactgttcctgtcaccatggaggatactataactgtgaagataaattcaagccacagagcttgccagatcacaagtgggagatgtgcaccagcattgacaagttttcctggggctatcgtcgtgacatggcattgnctgatgttacagaagaatctgaaatcatttcggaactggttcagacagtaagtttgggaggcaactatcttctgaacattggaccaactaaagatggactgattgttcccatcttccaagaaaggcttcttgctgttgggaaatggctgagcatcaatggggangctatctatgcctccaaaccatggcgggtgcaatgggaaaggacacaacatctgt

SEQ ID NO: 2560 - DNA, 423 bp, homo sapiens
catacttaaaaagacagagcagaatcacattcattttcttaatagtatcactgtaaacatagcgaattttggcgcttttagattgctctgaaaatttctgaagagttgaccatagcagcctggtaagccttttcctttcccccaaagctctcctgccctttgcagaaagactgttggtgacaactgatgctaactaaatagcatgtggttgagcttgccaaatccttccacctcctcccataggcaacagggtgacttggcttaaaggcattgagtaagcaagtaggttatcagagaacagagggaagattccattgtagataatttccaaatattacaattgatgaactcagagttcaactgctcagttccttcttctgctgacctgatacagatataatcccaatgggatctcagatcttt

SEQ ID NO: 2561 - DNA, 344 bp, homo sapiens
  misc_feature (300)..(300): n=unknown
gggctctcaactccagcataagccaaatcatgtagctctcctgaatgagggtttaagtgcttcagagaaaggtgaacgaggaattggacttgccagaccagttcatgagggaaggctggagggccctggcattaaggacagcacaggcacaccaatgacagagcaaaggtgctgcagaggggccacgatggctaaggaatggctttgttatgattccctcattggcaggatctggtgaagaatcatctgatgtatgctgtgagagaggaggtggagatcctgaaggagcagatccgagantggtggagaagaactcccactagagcgtgagaacaccctgttga

SEQ ID NO: 2562 - DNA, 354 bp, homo sapiens
gctacatttggaaaatcaaaatccaaatcctggaaccatacatcaggataaggtgtcaaaaagtggaaagtgttcactctcacaaaacccgctacagacaagctttctgggcacacctcccaggctccattggatcaaagccatccccttgttcatccctcatccacagtaggacaccatccttctgttcacttgaaagttttccacaataattacaaaacaaaacaaaaaacgttttcaaatgacactgtgaagcccaaaactgatttctctcaacccccattctatgtagtcagcaccagtgaatggtgggtttggcattcaaaacaggacttcacgtttcagtggacagct

SEQ ID NO: 2563 - DNA, 570 bp, homo sapiens
  misc_feature (441)..(565): n=unknown
agaaaatatagaaatatatgcaaaaattatagttttctttagatcagaaactgatatttttgggtcagccatatgtattttgtttaaaggatttaaaataaagtgccgtcatgtagccctgtggaagggagcacataaccagctgtttggcatgacaggtgacttagtatatttgtaattggttttaaaaccaatacaccatactttctttctgcaaacagccatctttatacttagggaagaaaaattgttgggttctagacttttttaatataaattttgttgatatggaattaggtaagtttaagtgtctatgtgcatatgttttttatataagttttttctattcagtttcactgatccaactggcagtgggtaaatatggcataagttaataacactttccccaaaatggtgctttggatttgaaaagggtctgangggggagaagggagaaccgtatccatcccttagcttcctctccttaaataaaancctaggaaaaaccggggtagtaaaaccggtnggataagtcnnggaaaaacaccccagcaaaggggccacnagcct

SEQ ID NO: 2564 - DNA, 537 bp, homo sapiens
agaagaagaaactcaaaattcctatctgcgtgctaatttgaaaagaacaacgtagatagatttgttggcacatatatatggcatattcacatatggcatatatacatatggggagaaaacatgaaccaaaggccaattcagttatgggagctcatctccttccatctctcctaatcaagagcaaagggaacagcaggcctaacagcagggttgggaaggcaaaaggactggcactgaactaagtgaaagggcgtctggtctattcagaggaagaggctggaatggcttaacaatagcaggcatttataagtgcccaccctcaccaatgcatcgggggtggtccctagatatgaaaggtgaggaagtctctgcatactgtgatggtaccacgggctgcttcaattgtaaggcaaaggaagcaggaaagaaaggaagggatgcatttagaggcttttccacacaagcgagtgtgccacgcccctctgggttttcagcagtgaggtaaccattcagatttaaccatgccaactctcctct

SEQ ID NO: 2565 - DNA, 238 bp, homo sapiens
  misc_feature (27)..(222): n=unknown
cacgaccgaggcagagcagtcattatngcgaaccttggctgctggatgctggntctctttgtggccacattgagtgacctgggcctctgcaagaancgccccgaagcctggaggatggaacactnaanngcagccgatacccgggggcagggcagncctggaggcaaaccgctacccacctcanggcggtngtggctnggggcanctcatggtngtggctgngggcaacctccatggt

SEQ ID NO: 2566 - DNA, 416 bp, homo sapiens
  misc_feature (372)..(372): n=unknown
atttacaatttttttatataacaaaacaagaacatgcaaagttacaaatatagaaaatataaagtacatgcatatttcaaagacctgttaatggtgtccactttggattcttacatgaaacgattcagtgcacattgtaagcctaaggaccacgcaaaagggtttcccacatattaagtattcagtaccttacaaaagttaatgcattagacacttcagatgttaactgctctaaacaaaactcctaagtctgtcctatgcaatatatattttatatacatatatatttttacatagaatactcacaaagtgcaagccaataataacattgcagaaaagtaatacatatctgctaggtgacaatatcaaacnattcagggaataattttactttaaattaacattaacagaatttc

SEQ ID NO: 2567 - DNA, 517 bp, homo sapiens
  misc_feature (102)..(284): n=unknown
  misc_feature (500)..(500): n=unknown
gccacagagaaggtatttgtaattggattctcctggaccagcccagcctctgaagttctagaattaggtgcctcctttgcccaaaggctatcagctattggnggggagggtggcannnnnnnnnnnnnnnnnnnnnnnnnnnnnnnnnnnnnnnnnnnnnnnnnnnnnnnnnnnnnnnnnnnnnnnnnnnnnnnnnnnnnagagtcaatgttgtctagtatcactttggaaggagaataagtctatgaaatgcattaaactcagcagggaaagtcctaaggagnagtttctccaggggccacagaagaccctttgggtctctatgagaggccccaaggcaacacagggcagagaggtctttccggtgagggctgttcaagtactaagtgacagtaccaggaggagtgcaaagccctggctcacaccactgatctactggcaagatgggtctggagaaggctcatctggcccagccagtggggtaacagctactttggtgntaaaacccaccccttca

SEQ ID NO: 2568 - DNA, 431 bp, homo sapiens
  misc_feature (157)..(157): n=unknown
tacagcccatgcctgcagccctttcagtgggtggctccagatagtgttgtcctttcagttgctgggagcggtgaggcccagccctttccccttcctcccaccactattcctaacctggggcctggcaggggtggagtgatgtgatctaagggtcccnggagaagggtggagtggaagaggcagggtcttgggttaaagggaagattctgaggtctcagggcaaagggaaaggtgtttggatgaagactgaggcagtgcctacctccctccacatctgaggatcaagcaggtgtggcaagaacagagccctggcctgggctctgctggccgcagcctcaggagccagggttaaggccagagataaatgaagatttgagccattgataaatgccaatatatgtttcaggtatttcattaggatcctccccatc

SEQ ID NO: 2569 - DNA, 411 bp, homo sapiens
  misc_feature (223)..(223): n=unknown
  misc_feature (398)..(398): n=unknown
ctctggtattcatgccaaagacacaccagccctcagtcactgggagaagaacctctcataccctcggtgctccagtccccagctcactcagccacatacaccatgtgtgaagaggagaccaccgcgctcgtgtgtgacaatggctctggcctgtgcaaggcaggcttcgcaggagatgatgccccccgggctgtcttcccctccattgtgggccgccctcgcnaccagggtgtgatggtgggaatgggccagaaagacagctatgtgggggatgaggctcagagcaagcgagggatcctaactctcaaataccccattgaacacggcatcatcaccaactgggatgacatggagaagatctggcaccactccttctacaatgagctgcgtgtagcacntgaagagcacccc

SEQ ID NO: 2570 - DNA, 575 bp, homo sapiens
  misc_feature (268)..(268): n=unknown
ggatccttggagaacctgttctgactttagaagcacttcctgtggacaatggagggccctgcctcatcatactcaggcttgctgatccacatctgctggaaggtggagagagaggccaggatagagcccccgatccagactgagtacttccgctctgggggagcaataatcttgatcttcatggtgctgggggccagggctgtgatctccttctgcatcctgtcagcaatgccagggtacatggtggtgcccccagagaggacattgntggcatataagtccttacggatgtcaatgtcacacttcatgatggaattgtaggttgtctcatgaattccagcggactccatgccaataaaggaaggctggaagagggtctcagggcagcggaagcgctcattgccaatggtgataacctgcccatctggcagctcatagctcttctccagggaggaagaggaagctgctgtggccatctcattctcaaaatccagggccacatagcacagcttctccttgatgtctcgcacaatttctctctcagctgtggtcacaaaggaatagcctctctctgt

SEQ ID NO: 2571 - DNA, 332 bp, homo sapiens
  misc_feature (17)..(75): n=unknown
agctgggactgacagancaggacatcattgacctgcccgctctgttcaagattgacgaggaccaccgtgccaganccttcttcccaaacatggtgaacatgatcgtgctggacaaggacctgggcatccccaagccattcgggccacaggttgaggaggaatgctgcctggagatgcacgtgcgtggcctcctggagcccctgggcctcgaatgcaccttcatcgacgacatttctgcctaccacaaatttctgggggaagtccactgtggcaccaacgtccgcaggaagcccttcaccttcaagtggtgggcacatggtagccttgacctg

SEQ ID NO: 2572 - DNA, 319 bp, homo sapiens
  misc_feature (143)..(143): n=unknown
  misc_feature (264)..(264): n=unknown
aaggaaccgaagcatctgctgctgaagagaccacagaaatggtgtcagcagtctcccagttaaccgactccccagacaccacagaggaggccactccggtgcaggaggtggaaggtggcgtacctgacatagaagagcaaganaggcggactcaagaggtcctccaggcagtggcagaaaaagtgaaagaggaatcccagctgcctggcaccggtgggccagaagatgtgcttcagcctgtgcagagagcagaggcagaaaganccagaaagagcaggctgaagcgtcgggtctgaaagaaaagagaccggatgtagtg

SEQ ID NO: 2573 - DNA, 415 bp, homo sapiens
cactagttatttttaaaaaaaaactcaacaagatagttgagtgaacacaatgtatttcttatgcctttgggtcaaacacgcacatgtgcacacacacatgccgttttattttattctaaagcagtcacattaggaggtaaaacgaagtcgttcttttcataacatcgataagactaaatggcatttcaatcaccaaaaaccatgaaactatcctagatctttgaatctagttgatagttattttcctcaactgaaggttctacacgaaggcattaattatttgctcccgattccttatgtaacaaatttgccatctattggcataaaagagaaaaattatcttagaagacaaggaagcttacctgcatgatgttttaagatctgtaagttctgactttgcagattctctcccttg

SEQ ID NO: 2574 - DNA, 239 bp, homo sapiens
  misc_feature (44)..(44): n=unknown
  misc_feature (216)..(231): n=unknown
ggctcctgctgctctggttcccaggtgccaggtgtgacatccanatgacccagtccccatcctccctgtctgcatctgtaggagacagagtcaccatcacttgccgggcaagtcagggcgaaaaatgatttaggctggtatcagcagaaaccagggaaagcccctacgcgcctgatctatgctgcatccaggttgcaaagaggggtcccatcaagnttcagcggcagtggntctgggac

SEQ ID NO: 2575 - DNA, 543 bp, homo sapiens
aaagatgagctggaggaccgcaataggggtaggtcccctgtgcaaaaagggtcagaggccaaaggatgggagggggtcaggctggaactgaggagcaggtgggggcacttctccctctaacactctcccctgttgaagctctttgtgacgggcgagctcaggccctgatgggtgacttcgcaggcgtagactttgtgtttctcgtagtctgctttgctcagcgtcagggtgctgctgaggctgtaggtgctgtccttgctgtcctgctctgtgacactctcctgggagttacccgattggagggcgttatccaccttccactgtactttggcctctctgggatagaagttattcagcaggcacacaacagaggcagttccagatttcaactgctcatcagatggcgggaagatgaagacagatggtgcagccacagttcgtttgatttccaccctggtcccttggccgaacgtccacgggtaacttttatgctgtagacagtaataagttgcaaaatcttcaggctgcaggctgctgattgtg

SEQ ID NO: 2576 - DNA, 480 bp, homo sapiens
  misc_feature (421)..(465): n=unknown
ccgaactggggaggaggcaagaaatgtggggtgtgtcagaagacggtttactttgccgaagaggttcagtgcgaaggcaacagcttccataaatcctgcttcctgtgcatggtctgcaagaagaatctggacagtaccactgtggccgtgcatggtgaggagatttactgcaagtcctgctacggcaagaagtatgggcccaaaggctatggctacgggcagggcgcaggcaccctcagcactgacaagggggagtcgctgggtatcaagcacgaggaagcccctggccacaggcccaccaccaaccccaatgcatccaaatttgcccagaagattggtggctccgagcgctgcccccgatgcagccaggcagtctatgctgcggagaagtgattggtctgggaagtcctggcataaggcntgctttcgatgtgccaaatgtggcaaaggccttgagtcaaccancctggcagacaagga

SEQ ID NO: 2577 - DNA, 546 bp, homo sapiens
ggtacagcccatgcctgcagccctttcagtgggtggctccagatagtgttgtcctttcagttgctgggagcggtgaggcccagccctttccccttcctcccaccactattcctaacctggggcctggcaggggtggagtgatgtgatctaagggtccctggagaagggtggagtggaagaggcagggtcttgggttaaagggaagattctgaggtctcagggcaaagggaaaggtgtttggatgaagactgaggcagtgcctacctccctccacatctgaggatcaagcaggtgtggcaagaacagagccctggcctgggctctgctggccgcagcctcaggagccagggttaaggccagagataaatgaagatttgagccattgataaatgccaatatatgtttcaggtatttcattaggatcctcccatcaagcagggaactagatgtttgagaagatcaaacaacatcctgactttgggggccttaagacctggggtattctcctcccagtcctagtgggaggctatccattcccacaaagac

SEQ ID NO: 2578 - DNA, 441 bp, homo sapiens
  misc_feature (293)..(433): n=unknown
gcacctactacaacccgtccctcaagagtcgagtcaccatatccgtggacacgtccaagaaccagttctccctgaggctgagctctgtgaccgccacagacacggctgtgtattactgtgcggggacttctcgaggatattgtgatagtagcatctgccacaactggtacctcgatctctggggccgtggcaccctggtcactgtctcctcagcatccccgaccagccccaaggtcttcccgctgagcctcgacagcaccccccaagatgggaacgtggtcgtcgcatgcctngtccagggcttcttcccccaggagccactcagtgtgacctggagcgaaanggnacagaacgtgaccgccagaaacttcccacctagccaggatgcctccggggactgtacaccacgagcagccagctgaccctgccggcnacacagtg

SEQ ID NO: 2579 - DNA, 433 bp, homo sapiens
  misc_feature (4)..(4): n=unknown
  misc_feature (303)..(377): n=unknown
aggngggcggctcagtagcaggtgccgtccacctccgccatgacaacagacacattgacatgggtgggtttacccgccaagcggtcgatggtcttctgtgtgaaggccagcggcagggcctcgtggcccaccatgcaggagaaggtgtcccccttcttccagtcctcggctgccacgcgcagtatgctggtcacagcgaaggtggtggtgccctggctgggctcctgccgggatgcccaagtcaggtacttctcgcggggcagctcctgtgacccctgcagccagcgaaccagcacatccttngggctgnagccacgtgccaggcacgtcagcgtcaccagctcgttcagggccagctcctccgacggcggcggcanaggtggacctcgggccggaatgtgtttcggattttgtgatgttggcggttagtggg

SEQ ID NO: 2580 - DNA, 322 bp, homo sapiens
  misc_feature (8)..(320): n=unknown
cacatggnctggggtgcactgggacagctgctgccagcgagagggaccngggcaccactctctagggagcccacactgcaagtcaggccacaaggacctctgaccctgagggccgatgaggccagggacaggccaggngggccttgaggcccctggtganccaggccccaacctcaggcancgctggcccctgctgctgctgggtctggccgtggtaacccatnnactgntgngcccaacagctgcatcgcaagcanggccctggnccctgnannccctngaggaagcagccggtccancctnangaaccggtggggcangt

SEQ ID NO: 2581 - DNA, 548 bp, homo sapiens
  misc_feature (10)..(10): n=unknown
  misc_feature (494)..(513): n=unknown
cagggagaanggctggatggcttgggatgcagagagagacccttcccctgggatcctgcagctcaaagcccctttgggtggggtcggggctgggaacctatgaacattctgcaggggccaccgtcttctccacggtgctcccttcgtgcatgacctggcagctgtagcttctgcgggacctccactgctcgggcgtcaggctcaggtagctgctggccgcgtacttgttgttgctctgtttggagggcgtggtcatctccacgccctgggtgatgggggtaccatctgccttccaggtcaccgtcaagattcccggataaaagtcattcatgagacacaccagtgtagccttgttggcttggagctcctcagaggacggcgggaacagagtgaccgagggggtggccttgggctgacttaaaacggtgagctgggtcccgctgccaaacacatgcgtcactgagttatgcttggattgaaacccccggggccancacctgggggccagtccangagccgcgctggaacaggaacctgccccaccggct

SEQ ID NO: 2582 - DNA, 424 bp, homo sapiens
  misc_feature (45)..(45): n=unknown
  misc_feature (234)..(411): n=unknown
gtcctgtcctgttctccagcatggtgtgtctgaagctccctggangctcctgcatggcagctctgacagtgacactgatggtgctgagctccccactggctttggctggggacacccaaccacgtttcctgtggcagggtaagtataagtgtcatttcttcaacgggacggagcgggtgcagttcctggaaagactcttctataaccaggaggagttcgtgcgcttcgacagcnacgtgggggagtaccgggcggtgacggagctagggcggcctgtcgccgagtcctggaacagccagaaggacatcctggaggacaggngnggcnaggtggacaccgtgtgcagacacnacttacggggttggtgcagagcttcacagtgcagnggcgagtccatcctgaggtgactgngtatcctgcccaa

SEQ ID NO: 2583 - DNA, 525 bp, homo sapiens
  misc_feature (386)..(493): n=unknown
caggaggagtacagatgcatgggaggcaggaagcgttaggtaaaggggagcacaaaacttggaagaaaaggggctgccatcaatgctgggacttcaggccaaaggcatgagctgaggcagccacaggggaggacattttctgcagagttgctgaaccagtagcaaccaggtccggagaaaggtctctcttgtggaagaatgagagccaagcggggaagtgtttcatcctgcaaagctggggcagaaggtttttccttgaatgtggtcatcttcacttcagctcaggaatcctgttggctgaagtccagagtgtcctttctgattcctgaagtagatgaacaacccggccccaaggaagagcaggcccagcacaaagcccccgactncactcagcatcttgctctgtgcagattcagaccgtgctctccattccactgtgagagggtcatcacacttgganagctccacttggcaggtgtaaacttctccactnccgaggaactgtttccagcatcaccagggtct

SEQ ID NO: 2584 - DNA, 417 bp, homo sapiens
  misc_feature (53)..(63): n=unknown
  misc_feature (275)..(401): n=unknown
gggtgctgcagagcagtgactaaacagcatgaccttctggcagctgcacattncctgtttcanctccgggctccttttgtgctcatttgatgtggatgagccacgagtatggaacatggaggactcgtgtggggtgtcttatgtatgaatgcgtgtatcactgcatgccttacctgcacactgattttgtgaatggccttgtgcatttcctgtgtccactaacagccaagtccgacagctggaagaacaattaagaataatggatcagaccttgnnagcattaatggctgcagaggataaggtactgatggctcgtgtngttttaggtttaactgcaaccccagacatctttcagcttccaatgcctccttggttcgtttggtataaacgactgcaacttnaacttcaaccctctgc

SEQ ID NO: 2585 - DNA, 587 bp, homo sapiens
  misc_feature (172)..(172): n=unknown
  misc_feature (579)..(579): n=unknown
tgtttacatatagttaaaactctcaagaaaacgtcctttaccagttgtatgtggtgtctaaatctttaacatgaaggactgaaaagagtggaaatccacactgattgttatcctacagattgtcatgagctgcacgtgtgccaatcagaaaggaatggaagtctcagaagancagcgtggcttacagacccttggctttagtgaattcaggcatgcgggatccatagtctcatcttgtagtaaaactcaagacaaaataaattagtgttggacagagttctacattgtacaatgttgaacaaaagaccacagggggaccttttgttcaaagtagcaccaatccacacctgattgtgtttccaacattaaccttcctgttgactctatcattggcactttgaatggaacttctcctgctttagtgaggattcctacgctgactaagcacactgtgttgctaaactctctacaaagtgtggcagcatcaacccgggaaatggcacatttgaaccaggatcgccctgacatgggttgcctttttgtatgtgttttccccaccccctgacctagctggtatcntgtggatg

SEQ ID NO: 2586 - DNA, 440 bp, homo sapiens
  misc_feature (279)..(378): n=unknown
gccagcccccagggaagggcctggagtggattgggagtgtctattctagcgggacctcctactacagcccgtccctcaagagtcgagtcaccatatccgtagacacgtcccagaaccagctgtccctgaagctggcttctgtgattgccgcagacacggctatctattattgtgcgagacatgtagaaagcagtggttatacctactttgactactggggccagggaaccctggtcaccgtctcctcagcatccccgaccagccccaaggtcttcccgntgagcctctgcagcacccagccagatgggaacgtggtcatcgcctgcctggtccagggttcttcccccaggagccactcagtgtgacctggagcgaaanggacagggcgtgaccgccagaaattcccacccagccaggatgctccggggactgtacaccac

SEQ ID NO: 2587 - DNA, 525 bp, homo sapiens
  misc_feature (417)..(428): n=unknown
cgggcggctcagtagcaggtgccgtccacctccgccatgacaacagacacattgacatgggtgggtttacccgccaagcggtcgatggtcttctgtgtgaaggccagcggcagggcctcgtggcccaccatgcaggagaaggtgtcccccttcttccagtcctcggctgccacgcgcagtatgctggtcacagcgaaggtggtggtgccctggctgggctcctgccgggatgcccaagtcaggtacttgaacagcgctcttcccacttgagggcgtccaggtgaaggtgacacctgaggcatctctcaggccggtcagtgtgcacgtgaggttcgcttctgaacctaagagcagggtcctcgagggccggtcggtgcagtgacagtcgggggtggcagcatgagggagatggggtangtggagttnanggagatggggtaggtggagtttaagggaacttgggcagggcacagttcacatcctggcttgggattcgtgtagtgcttcacgtggcatgtcaacgga

SEQ ID NO: 2588 - DNA, 376 bp, homo sapiens
  misc_feature (53)..(88): n=unknown
cacagctccagagaaggtgaccattctcagaactccagctattcactctccanggagaaggacctcaaatcgccactctttgggcggnaggtgcggtccccacggccggctctacgaggaagagttctggctcttttgtccactgagatggtcttggtttttcacttaacaaattttttaatggaatctttgtttttgttctccatcttgtttgttagagtctctcggcctttatttacaaattccttgcaactaatagcgctccttccccaagatatggtagtaagagtaatttttcattgtagtgtagtctccatcagtaacagcaaggccctggaagacttgatcactttttctgtgtcatttcagtcaaaag

SEQ ID NO: 2589 - DNA, 209 bp, homo sapiens
  misc_feature (174)..(174): n=unknown
gcagcatcgggggtgccgcagccatggcctggaccgctctccttctgagcctccttgctcactttacagcttctgtggcctcctattatttgactcagccactctcagtgtcagtggccctgggacagacggccaggattacctgtgcgggaaacaacattggaagcaaaactntgcactggtaccagcaagaagccaggcctgggccc

SEQ ID NO: 2590 - DNA, 571 bp, homo sapiens
  misc_feature (373)..(373): n=unknown
  misc_feature (536)..(546): n=unknown
agggagaagggctggatgacttgggatggggagagagacccctcccctgggatcctgcagctccaggctcccgtgggtggggttagagttgggaacctatgaacattctgtaggggccactgtcttctccacggtgctcccttcatgcgtgacctggcagctgtagcttctgtgggacttccactgctcgggcgtcaggctcaggtagctgctggccgcgtacttgttgttgctctgtttggagggtttggtggtctccactcccgccttgacggggctgccatctgccttccaggccactgtcacagctcccgggtagaagtcactgatcagacacactagtgtggccttgttggcttggagctcctcagangagggcgggaacagagtgacagtggggttggccttgggctgacctaggacggtgacctgggtcccagtcccgaacacaaaagagttgtcggcccacacctgacagtaatagtcagcctcatccccgacttggggctctgctgatggtcagggtggccgtgttncccgagtttngagccagagaatcgctcagggaccc

SEQ ID NO: 2591 - DNA, 217 bp, homo sapiens
  misc_feature (26)..(201): n=unknown
gacggaaccatggaagccccagcgcncttctcttcctcctgctactctggctcccanagaccactggagaaatantgatgacgcagttccagccnccctgtcngtgtctccaggggaaagagccaccctctcctgcagggccagtcagagtgttagcagctacttagcctggtaccagcagaaacctggccaggctcccangctcctcatctatggt

SEQ ID NO: 2592 - DNA, 433 bp, homo sapiens
  misc_feature (21)..(427): n=unknown
taaagccaaggaggaggaggncgggtgaggtgaaagatgagctggaggaccgcaataggggtangtcccctgtggaaaaagggtcagaggccaaaggatngganggggtcaggctggaactgaggancaggtgggngcacttctccctctaacactctcccctgttgaagctctttgtgacgggcgagctcangccctgatgggtgacttcncaggcgtagactttgtgtttctcgtagtctgctttgctcancgtcanggtgctgctgaggctntacgtnctgtncttgctgtcctgctctgtgannntctcctgggagtnacccgattngagggcgttatccacnttccactgtactttggcctctcnnggatanangntattcagcaggcananaacatnggcagttccagatttcaactgntnatcaga

SEQ ID NO: 2593 - DNA, 497 bp, homo sapiens
  misc_feature (23)..(119): n=unknown
  misc_feature (450)..(450): n=unknown
cagtaacctgccctctttaaaantcccgccgcttccccctngcatccanaacagccacccctctctcgggcactgctgccatgaatgccttcctgctctccgcactgtgcctccttggngcctgggccgccttggcaggaggggtcaccgtgcaggatggaaatttctccttttctctggagtcagtgaagaagctcaaagacctccaggagccccaggagcccagggttgggaaactcaggaactttgcacccatccctggtgaacctgtggttcccatcctctgtagcaacccgaactttccagaagaactcaagcctctctgcaaggagcccaatgcccaggtagatacttcagaggctggaggaaatcgctgaggacccgggcaatgtgaaatctgtgcctacgctgcctgtaccggatgctaggggggcttgcccactgctgctnccctccgcagcagggaagtcttttctcctgcagaaagggcacccatg

SEQ ID NO: 2594 - DNA, 518 bp, homo sapiens
  misc_feature (483)..(483): n=unknown
gcagggaaggacagtgttggggcgaggcctccagtcacccagttcctccccgggctgctcctcccgactggaccagggtaggttgagctgctgggagtggagtatcatgggtggccctttctgcaggagaaaagagcttccctgctgcggaggggaggcaggcagtgggcaagcccccctagcatccggtacaggcagcgtaggcacagatttcacatgtgcccgggtcctcagcgatttcctccagcctctgaagtatctcctgggcattgggctccttgcagagaggcttgagttcttctggaaagttcgggttgctacagaggatgggaaccacaggttcaccagggatgggtgcaaagttcctgagtttcccaaccctgggctcctggggctcctggaggtctttgagcttcttcactgactccagagaaaaggagaaatttccatcctgcaacggtgacccctcctgccaaggcgggnccagggccccaaggaggcacagtgcggagagcagg

SEQ ID NO: 2595 - DNA, 437 bp, homo sapiens
  misc_feature (361)..(364): n=unknown
ctagttttcttatgcagggggtactctgccaataaagttgagtatgcttatattgtgtttctgttaaatatctctgctacttcaggaattctttatgtgtaaatgttttctgctttttctgggaattaaagcaaatttgttgtgtcaacatcttgactcagatgttcaagtacctttgtgtcttgatttgccttagcatgtagaaaagggacttgtaacattaatgcagatttgaaagaaagattgttaacctcaggcacatcttctgttaatatctaatagtactacttgaaggttattttctgtatttaataaattccttaaaaaggataattttctaataaggagagagaaaatgatnganacgtttgaacttgaaagaaggctttgcataaaattacagatcatccagatcaatgcctaaaccaaaatgtcta

SEQ ID NO: 2596 - DNA, 389 bp, homo sapiens
  misc_feature (6)..(6): n=unknown
  misc_feature (173)..(173): n=unknown
ccagtnctggaccagtcaccagtgaagactatccaagctggtaccagcagagacctggacaagccccccgggcacttctctatctcaccactaacagattctcctggacccctgcccacttcacaggcgccttccttgggggcaaagctatcctgaaactgtcgggtgcgcanctgaggacgaggctgattattattgctcgcttttctctcgtggtagaggtcctcaagtgttcggcgcagggactaagttgatcgtcctaggtcagcccaaggctgccccctcggtcactctgttcccgccctcctctgaggagcttcaagccaacaaggccacactggtgtgtctcataagtgacttctacccgggagccgtgacagtggcctgga

SEQ ID NO: 2597 - DNA, 522 bp, homo sapiens
  misc_feature (89)..(95): n=unknown
  misc_feature (506)..(506): n=unknown
gggagaagggcttgatgccttggggtgggaggagagacccctcccctgggatcctgcagctctagtctcccgtggtggggggtgagggntgagancctatgaacattctgtaggggccactgtcttctccacggtgctcccttcatgcgtgacctggcagctgtagcttttgtgggacttccactgctcaggcgtcaggctcaggtagctgctggccgcgtacttgttgttgctttgtttggagggtgtggtggtctccactcccgccttgacggggctgctatctgccttccaggccactgtcacggctcccgggtagaagtcacttatgagacacaccagtgtggccttgttggcttgaagctcctcagaggagggcgggaacagagtgaccgagggggcagccttgggctgacctaggacgatcaacttagtccctgcgccgaacacttgaggacgtctaccacgagagaaaagcgagcaataataatcagcctcgtcctcangctgcgcacccgacag

SEQ ID NO: 2598 - DNA, 495 bp, homo sapiens
  misc_feature (162)..(162): n=unknown
ataccatcattgtcaccaaactccttcaaggcacagtcatcttatctgggccccgtcctctcctcaggtgtcccaccccagagcttggtatatagttggagacatgcagataaggccctccctctgctgatgaaaatgagcccagccctgaccctgcagctntgggagaggagccccagccgtgagattcccaggagtttccacttggtgatcagcactgaacacagaccaccaaccatggagtttgggcttagctgggttttccttgttgctattttaaaaggtgtccaatgtgaggtgcagctggtggagtccgggggaggcttggtacagccagggcgatccctgagactctcctgtacaacctctggattcaggtttggtgattatgctatgagttgggtcgccagctccagggaaggggctggagttagggtaaggtttcattagaaaacaaagctgatggtgggacaaatggaattacgccgcgtctgt

SEQ ID NO: 2599 - DNA, 579 bp, homo sapiens
  misc_feature (297)..(308): n=unknown
cgggcggctcagtagcaggtgccgtccacctccgccatgacaacagacacattgacatgggtgggtttacccgccaagcggtcgatggtcttctgtgtgaaggccagcggcagggcctcgtggcccaccatgcaggagaaggtgtcccccttcttccagtcctcggctgccacgcgcagtatgctggtcacagcgaaggtggtggtgccctggctgggctcctgccgggatgcccaagtcaggtacttctcgcggggcagctcctgtgacccctgcagccagcgaaccagcacatcnttnggnntnnngccacgtgccaggcacgtcagcgtcaccagctcgttcagggccagctcctccgacggcggcggcagcaggtggacctcgggccggaatgtgtttccggattttgagagggtggcggttagcggggtcttggactcggggtaggcagcagtgcaagtgaaggtcttcccatggttccatgggctcggcacagcccggcaggacactggacacgctgtagcagccacagaggtcacggtcaggtggtccttgaacagcgctcttcccacttga

SEQ ID NO: 2600 - DNA, 478 bp, homo sapiens
  misc_feature (4)..(81): n=unknown
  misc_feature (402)..(433): n=unknown
aggngcctcagccatggcatggatccctctcttcctcggcgtccttgcttactgcacagcatcagtggcctcctatgagtngactcaggcaccctcagtgtccgtgtccctaggacagacagccaccattacctgctctgcagacaaattgggggataagtatgcttcatggtatcagcagaagtcaggccagtctcctgtgttggtcatctatcaagataacaagcggccctcagggatccctgagcgattctctggctccaactctgggaacacagccactctgaccatcaacgggacccaggctatggatgagtcggactattactgtcaggcgtgggacagcagaactgtggtctttggcggagggaccaagctgaccgtcctaggtcagcccaaggntgcccccttcggtcactctgntcccggcctnctctgaggagcttcaagccaacaaaggcacactggtgtgtctcat

SEQ ID NO: 2601 - DNA, 504 bp, homo sapiens
  misc_feature (2)..(76): n=unknown
cngggagaagggcttgatgccttggggtgggaggagagacccctcccctgggatcctgcagctctagtctcccgtngggggggtgagggtttagaacctatgaacattctgtaggggccactgtcttctccacggtgctcccttcatgcgtgacctggcagctgtagcttctgtgggacttccactgctcaggcgtcaggctcagatagctgctggccgcgtacttgttgttgctttgtttggagggtgtggtggtctccactcccgccttgacggggctgctatctgccttccaggccactgtcacggctcccgggtagaagtcacttatgagacacaccagtgtggccttgttggcttgaagctcctcagaggagggcgggaacagagtgaccgagggggcagccttgggctgacctaggacggtcagcttggtccctccgccaaagaccacagttctgctgtcccacgcctgacagtaatagtccgactcatccatagcct

SEQ ID NO: 2602 - DNA, 555 bp, homo sapiens
  misc_feature (124)..(534): n=unknown
ctctggccctcctccttccccctgcttagcttgtactttggacgcgtttctatagaggtgacatgtctctccattcctctccaaccctgcccacctccctgtaccagagctgtgatctctcggnggggggcccatctctgctgacctgggtgtggcggagggagaggcgangctgcaaagtgttttctgtgaggccctgggcaagggganggggcngnnggggcggggcggcangggcttcagaagtatctgcacaattagaaaagtcctcagaagctttttcttggagggtacactttcttcactgtccctattcctagacctggggcttgagcngaggangggacgatgtgcccagggagggacccaccagagcacaananaaggtggctacctgggggtgtcccagggactctgtcagtgccttcagcccaccagcaggagcttggagtanggggagtggggatgagtccgtcaagcacaactgttctctgagtggaaccaaanaagcaaggagctaggaacccccagtcntgccccccaggagcacaagca

SEQ ID NO: 2603 - DNA, 589 bp, homo sapiens
gaaaagagatctaattgagaaaatatacaaagcatttaagagtttcatccccagagactgactgaaggcgttacagccctcctctccaaggctcagggctgagaacggttagcatatcgaatgatcagtaaaaacatgcaaaagtgagaaggaaagggaaaaaggtgcattcccctaagctgagggggatggaatttcagaacagaggaggcagggtggacaagtaccaggtggctctccctttccctctgtgttatctttcaaaacagttccaagcttggagaaagcaatgagctccacctactcagcagaacccacggctcgtcccccgtggacgtgactggaaagggcccaaaggtgaccttgcctgccccgttcctcagccgcccatcccactgccttgactgaggggaccctgcttgtgctcctggggggcaggactgggggtcctagctccttgcttctttggttccactcagagaacagttgtgcttgacggactcatccccactccccaaactccaagctcctgctggtgggctgaaggcactgacagagtccctgggacacccccaggtagccaccttct

SEQ ID NO: 2604 - DNA, 482 bp, homo sapiens
gaccgcttgaggccttgggcaccggaggtcgcgggcctgggaagggcacgattcctcttaaacctcaggactttgggcgtttacaggcagatcctgcgtcttaggaggggtctctcctgcctgtctctttcccttgcacgctctggctacctggctttacgctgggaatagaggggctcgatggtctaccccacgtgctgccccacccacgagacaggtgtggctttgcgatgacctggtattcattcaaatggattggttggaaaattttcctcacctgaactatcctcctctccttgtcaactccctcctctcaccacaatgaggagttacgctgtttttgggtttttttagccagtcaaatatagcagtgggaggttgtataccaattttagtgacacaaatgttaataagttctgataacccactaccatcggaccagccggagttacactgttgttttgacagcagggtgtctctga

SEQ ID NO: 2605 - DNA, 493 bp, homo sapiens
ccgtgccggacccagcccactccacccatccccaagttcagagacaccctgctgtcaaacaacagtgtaactccggctggtccgatggtagtgggttatcagaacttattaacatttgtgtcactaaaattggtatacaacctcccactgctatatttgactggctaaaaaaacccaaaaacagcgtaactcctcattgtggtgagaggagggagttgacaaggagaggaggatagttcaggtgaggaaaattttccaaccaatccatttgaatgaataccaggtcatcgcaaagccacacctgtctcgtgggtggggcagcacgtggggtagaccatcgagcccctctattcccagcgtaaagccaggtagccagagcgtgcaagggaaagagacaggcaggagagacccctcctaagacgcaggatctgcctgtaaaacgcccaaaagtcctgaggtttaagaggaatcgtgccctttcccaggcccgcga

SEQ ID NO: 2606 - DNA, 516 bp, homo sapiens
agccctcagtggaacctgtcaagagcatcagcagcatggagctgaagaccgagccctttgatgacttcctgttcccagtgacacttcagagagctggtagttagtagcatgttgagccaggcctgggtctgtgtctcttttctctttctccttagtcttctcatagcattaactaatctattgggttcattattggaattaacctggtgctggatattttcaaattgtatctagtgcagctgattttaacaataactactgtgttcctggcaatagtgtgttctgattagaaatgaccaatattatactaagaaaagatacgactttattttctggtagatagaaataaatagctatatccatgtactgtagtttttcttcaacatcaatgttcattgtaatgttactgatcatgcattgttgaggtggtctgaatgttctgacattaacagttttccatgaaaacgttttattgtgtttttaatttatttattaagatggattctcagatattta

SEQ ID NO: 2607 - DNA, 559 bp, homo sapiens
aagcaaacaatgcttaaatttttcattcaaattcactttccacatgtcaaaagacctcaaggtagaaaaaaataaaataaaaatataaatatctgagaatccatcttaataaataaattaaaaacacaataaaacgttttcatggaaaactgttaatgtcagaacattcagaccacctcaacaatgcatgatcagtaacattacaatgaacattgatgttgaagaaaaactacagtacatggatatagctatttatttctatctaccagaaaataaagtcgtatcttttcttagtataatattggtcatttctaatcagaacacactattgccaggaacacagtagttattgttaaaatcagctgcactagatacaatttgaaaatatccagcaccaggttaattccaataatgaacccaatagattagttaatgctatgagaagactaaggagaaagagaaaagagcacagacccaggcctggctcaacatgctactaactaccagctctctgaagtgtcactgggaccaggagtcatcaaaggggctcggtcttcag

SEQ ID NO: 2608 - DNA, 509 bp, homo sapiens
  misc_feature (97)..(121): n=unknown
  misc_feature (414)..(414): n=unknown
gatccaaataacttatccactttttttaaaaagaagtcttatctataaaaaccttaaaggaattttccatttacttcactggtctagtaaaattatnnnnnnnnnnnnnnnnnnnnnnnnntatataaacattcacacacatacatatgtacaggtattgttatttgtaatttgacccttgtattttttagtttaaaatgttagtactgcaaaatgttatgtcctcaaaaacacattgtaccatgattatgccgctttcaatattgtaaagtgaggtttttgccgcattattattttttggatttcaatagcatagcttcaagttattcgtaagaattttttataaataatacatttttatacttttttataattaccatatctcatagtgaagtatataatatatatgatatnagctcaatatagtatattaattccgttaaacacaaagacatatcagtttgtagctttggtgggataaacaaattaatttagcattcatgggctat

SEQ ID NO: 2609 - DNA, 461 bp, homo sapiens
  misc_feature (459)..(459): n=unknown
gaagtttagaaactgtttcttacctgtaagttcttcaaatgattcatagggcttcagcataaagcgtttgcggtactcattaaaagactggtatttcatctgcctgctctggtcaatggaagcctgtgatactttctgtactgcgggtggaacattcctaccaccagcaacctgtggaaagtaaaattagttgtaaaacaagaattttaggcatatttactgtttgtattcagcttgccttaggtacaaatcaggtaaaactgaaactcccagcggagacaatttttatttgctggaaagatgcttacctacatttcaacaggagctctgcttaaaattcaatgggacaccagcctagaactaatttgcctttttacatttccaaaataacactagtattccagcctaaaatatttattcctataagattatagatactttttggaaaatatttttaangg

SEQ ID NO: 2610 - DNA, 438 bp, homo sapiens
  misc_feature (409)..(428): n=unknown
cacatcaggattggaaatcagtggtgtaagcattgcttcaactacttatgtatcctaaaaatagttacaggggtaacacagtattttgggcttatttttgggcataaaggcatactgacattctcttttcaccaactgcgtgtttccacttctcatagacctatgatttaattattctttttacctgttcaaggtgagagatggatgcaacaagagtagtacctaataataataaaagggcatcctgtggtagaggatccctctgccagcctccaagctagaaccaaggcaacaagccaccctccaaggaaaggtgtggtcagagattctagcaataaaagagtgtgtctttcatcattttctaatatgccatcatacagttctgagttcaggtgcttattctatttantacagcacatctggggggnctatttgtga

SEQ ID NO: 2611 - DNA, 63 bp, homo sapiens
  misc_feature (48)..(60): n=unknown
ctaataatttcaggaaagctgctgtttctcgtgttctgatctccgagntcccccttgtgncct

SEQ ID NO: 2612 - DNA, 426 bp, homo sapiens
  misc_feature (232)..(310): n=unknown
ggaccccgcatcttattagcaaccagggagatttctccattttcctcttgtctacagtgcggctacaaatctgggatttttttattacttctttttttttcgaactacacttgggctcctttttttgtgctcgacttttccaccctttttccctccctcctgtgctgctgctttttgatctcttcgactaaaatttttttatccggagtgtatttaatcggttctgttctgncctctccaccacccccacccccctccctccggtgtgtgtgccgctgccgctnnnnnnnnnnnnnnnnnnnnnnnnnnncgccccgtcgttacaccaacccgaggctctttgtttcccctcttggatctgttgagtttctttgttgaagaagccagcatgggtgcccagttctccaagaccgcagcgaagggaga

SEQ ID NO: 2613 - DNA, 447 bp, homo sapiens
caaggatacagccgttgtatttaaggggttgagggacaaagtagtgaagaactgtaagatattcaatatagtgtattgatgaattagaattgtatggaaagataaaccgcagaaggtgagagtcctgtataagtaaatccttacacatataactttgctcccaagtaacatggaacacgaggaattctgtgtgaatcagtgaggaccatatctcataaggctaaatactcttactaaccgatagcgcatagtaccgtgagggaaaggtgaaaagaacccctggaggggagtgaaatagaaccgaaattgtgtgcttacaagcggtcagagcccattagggtgatggcgtgccttttggagaatgatcctgcgagttacgttaaacggcgaggttaagtataacggagccaaagggaaaccaagtcttaatagggtgatatagtcgtt

SEQ ID NO: 2614 - DNA, 497 bp, homo sapiens
  misc_feature (269)..(366): n=unknown
ttgctttcgaaggaggttccttgttgtagtagtgagccctttttttagtggggaattctggggttggattgtaggggtaatgaggaggagagagccagggggagaagaaagggagagcttctttgctgccttatcagctttcgtgcttctttttgagattttatttgaactgtttgatgtcctgctttggttggaaggtgtgcacctgaagtagctgggtaaataaggggagctgttagtgatgagggttcctttggcagtaagggaancctcttttgccagatggcagcgtgggaatgaaaggatgtgataggcatctttggagtttgtataaatgttgacttgtttgcctttggaaanggttanggcttctggtgagactgtaagttctgcttttttgggggaggttcctgaaggtaaggggcctggctttaattacttggtcaagagaaacaactgcatatccagcaattctggaaggaaccagcgggcctgga

SEQ ID NO: 2615 - DNA, 499 bp, homo sapiens
cttcaaccacaaaggcacccaagagcaagacttctacgtgacctcggagactgtggtgcgggtacccatgatgagccgcgaggatcagtatcactacctcctggaccggaacctctcctgcagggtggtgggggtcccctaccaaggcaatgccacggctttgttcattctccccagtgagggaaagatgcagcaggtggagaatggactgagtgagaaaacgctgaggaagtggcttaagatgttcaaaaagaggcagctcgagctttaccttcccaaattctccattgagggctcctatcagctggagaaagtcctccccagtctggggatcagtaacgtcttcacctcccatgctgatctgtccggcatcagcaaccactcaaatatccaggtgtctgagatggtgcacaaagctgtggtggaggtggacgagtcgggaaccagagcagcggcagccacggggacaatattcactttcaggtgcttggggaaatgt

SEQ ID NO: 2616 - DNA, 479 bp, homo sapiens
ccagcacagcaaacccgccgggatcaaagtgtaccagtcggcagcatggctacgaaatgtgggaattgtggacccggctactccacccctctggaggccatgaaaggacccagggaagagatcgtctacctgccctgcatttaccgaaacacaggcactgaggccccagattatctggccactgtggatgttgaccccaagtctccccagtattgccaggtcatccaccggctgcccatgcccaacctgaaggacgagctgcatcactcaggatggaacacctgcagcagctgcttcggtgatagcaccaagtcgcgcaccaagctggtgctgcccagtctcatctcctctcgcatctatgtggtggacgtgggctctgagccccgggccccaaagtgcacaaggtcattgagcccaaggacatccatgccaagtgcgaactggctttctccacaccagcactgcctggccagcgggga

SEQ ID NO: 2617 - DNA, 62 bp, homo sapiens
ccacccgttttcccttgaccactaggggctctggctgggactttagttcctcgtcctccagc

SEQ ID NO: 2618 - DNA, 323 bp, homo sapiens
  misc_feature (92)..(92): n=unknown
  misc_feature (276)..(276): n=unknown
aaagactgcaaaactgcctgaaatgtgttttggcatcagctactgacacgtaaggtttcccaatcctcaactctgtcctgccagctgatgangggaaggaaagggattacctaggggtatgggcgaccaatcctgagtccaccaactgaccacgcccatccccagccttgtgcctcacctacccccaacctcccagagggaggagctatttaaggggagcaggagtgcagaacaaacaagacggcctggggatacaactctggagtcctctgaganagccaccaaggaggagcaggggagcgacggccggggcagaagttgag

SEQ ID NO: 2619 - DNA, 499 bp, homo sapiens
  misc_feature (164)..(164): n=unknown
  misc_feature (482)..(482): n=unknown
gtacagcttctttggttaagcacggagttgaggtggaggagagcagtagaaggctggaaatctgctggatgtctcattctgggtgggtatagaagggctcctgcctggcctctaggatgggtgagggatgctttctgcatggccaaggaacttggttagggtanggagggagggtatgagagagggaaattcagcactgggtggaaggtttccagggaagaggggactcagcaacgaggggtgctccctctgcagtgtttattggaatagtactggtactttttattgtaggtcgtcttgtttctagcaaaacaggtggcagcagccttatcacactcacacagttgacttctgcaggagtcctgttttgcacaggtgattctgctccccgagttgctaaacttgtagctcagaaatttggtgccacatccacgtttctccagacgtttgtagcaacagtcatgagtgacacagcagcgatncgttgcatccttggggg

SEQ ID NO: 2620 - DNA, 329 bp, homo sapiens
  misc_feature (202)..(202): n=unknown
ctagactcgcagctccttgctcaggaaaattaaactattcacgtttcagatcaagtgttgacagtcaccagtcaagaggagttcttaaagagttttatgttgactgaatattgcacattgagtccccattgagtccctggtgggaaaagtccacaatttcccattgatagctttttactgttgtgaaaaagggaagcgtcanccacacaaaagcctgcatgaccgctgcttcggagaagctctcgaccctaactgcagtcactgttacttggatcagatcaagcgcagtgactttttgggattcagtggttattctcccacacttcgta

SEQ ID NO: 2621 - DNA, 516 bp, homo sapiens
ctttcacaatagaagatcaatggtacacagtatattgaactctgtaacaaaattatttttgagaaaatacagaagtgagaaatagtgatttcctcaatttgtttatagtctatcacaaagtaggccaaagttcagtattaaatagatatcctaataaaagtttttacaagttttcctaaggaaatacattcataagactgtttaccttctgtttgacagcagtgacaggaacgtggggatccccactcatgacgagtccctagcactcagcccctggcacccacagccccggcgcgctccgtcacctggtagggagcagcctgggctgccgtgagtgaggtgttctcactctggttccgtgtttgtgtttagcctgtgcaattctcgtcaacacagaacacctgcctgcccacccccggtgctgaagaccgaccagtcaaggaggtgttggtgggagtgttgtgttcaccatgtggagatcaggcggcgattaccgcatcttctttgctgactttg

SEQ ID NO: 2622 - DNA, 418 bp, homo sapiens
  misc_feature (35)..(35): n=unknown
gggagcgaaggtttttgctgcgccaacgcagtganccgaaggctccgctcacgcccggcctgatcctgcctgaagatggtgccactggtggctgtggtatcagggccccgtgcccagctctttgcctgcctgctcaggctgggcactcagcaggtcggcccccttcagctgcacaccggggccagccatgcggccaggaaccattatgaggtgctggtgctgggtgggggcagtggcggaatcaccatggctgcccgcatgaagaggaaagtgggtgcagagaatgtggccattgttgagcccagtgagagacatttctaccagccaatctggacactggtgggtgctggtgccaaacaattgtcctcatctggtcgttcccacggcaagtgtgattccatctggtgtagaatggatc

SEQ ID NO: 2623 - DNA, 436 bp, homo sapiens
  misc_feature (196)..(422): n=unknown
cattttattattcccaaagaatcaagcccatcatgagtagcccacatggttgctgttcaaaggtactgaaaagggaggcatttggtcaccattacccatcaaggaactctttacaaggataggttccaagtccttcgtgctgctcttggtcattcagtgactgcagttttggcccagaagccatccaagatgagcnagtgctgagncatccttaactcatacctagatnnaacaacttncgcngaaacgctngtnctccccagtnancccttagcatcatattccaatacaggaaaggnatnaggncagctttcatgngatacatggaaaggcgctctttgctttnatcnaaggggaaggtttctagcggtctgctttgtagtcaaactcngcnagaatcacacggttgtagccggtcaccngtggacatgatgtg

SEQ ID NO: 2624 - DNA, 298 bp, homo sapiens
  misc_feature (155)..(262): n=unknown
gcacagtctgtctcttcgccggttcccggccccgtggatcctacttctctgtcgcccgcggttcgccgccccgctcgccgccgcgatgccagtgtttcatacgcgcacgatcgagagcatcctggagccggtggcacagcagatctcccacctgntgataatgcacgaggagggcgaggtggacggcaaagccattcctgacctcaccgcgcccgtngccgccgtgnaggcgncgtcagcaacctcgtccgggttggaaaanagatgttcaaaccactgaggatcagattttgaagag

SEQ ID NO: 2625 - DNA, 499 bp, homo sapiens
  misc_feature (222)..(222): n=unknown
  misc_feature (370)..(475): n=unknown
atccggcataaagtgtaaaccagtgtctcaaaccactggaagaaccgggagagcaaacatgatttttcttatttcctctaagtaatctttctttagtaaaacaacaagtgatctttggcatagattcatactttaaaggcattaatattgcatttatatcaggcaagcaactatacaaatatgctgagggccttgaaaataatcatcctcattataaagganatagtgaaagcctgagtgtaaaggaccaacttaagttgtacacattcgatgttgggaactaacacacagcgatgggtgggaaggaagggtgttcaggcaaggttcttactcctttactcatctggttctggctttggggaaaaataangtttcntgtgctnggnaaatacttagcagtngtaagtaccaaanagggaacactgncctctcantttgcctagtagggacttactgnggtgataaggagtatggnaacccattactctcttgaaccccc

SEQ ID NO: 2626 - DNA, 331 bp, homo sapiens
attctctcccaggccacaagacatttcctgctcggaaccttgtttactaatttccactgcttttaaggccctgcactgaaaatgcaagctcaggcgccggtggtcgttgtgacccaacctggagtcggtcccggtccggccccccagaactccaactggcagacaggcatgtgtgactgtttcagcgactgcggagtctgtctctgtggcacattttgtttcccgtgccttgggtgtcaagttgcagctgatatgaatgaatgctgtctgtgtggaacaagcgtcgcaatgaggactctctacaggacccgatatggcatccctggatcta

SEQ ID NO: 2627 - DNA, 500 bp, homo sapiens
  misc_feature (263)..(263): n=unknown
ttcgataatatgaaagcaaggagaaactaagttgcaccatttagctaagttcagggacaacattcatttataataaatcaaaaatttgatttttttcatgccatcagttgtacttaagcatatccatcatatttcagttgcaaaagatggtgaagaactcaagctgaagaggtgtctgctgaattttgttgcttcggtaagagcttttcaccatcagtttttagaaagtacgcatggctctccttctgttgatatctctcttnatttggcaaagagtacaatgaggacagcaaagagttgccatatagtcatcacaaatagatccagggatgccatatcgggtcctgtagagagtcctcattgcgacgcttgttccacacagacagcattcattcatatcagctgcaacttgacacccaaggcacgggaaacaaaatgtgccacagagacagactccgcagtcgctgaaacagtcacacatgcctgtctgccagttggag

SEQ ID NO: 2628 - DNA, 270 bp, homo sapiens
  misc_feature (27)..(27): n=unknown
  misc_feature (210)..(451): n=unknown
gtatttttaattttttttatttttgtntttttatttttaatctttcatttgttaaatttttaaactgtgctgcaataaaatgtgtgtggtactacttaacacttatgatcgtgatggcattttccctgaaagccatcttcctcctgtttcccttgaaatcccatcctgcttttcctgtacactacccctcacaaaaccacaagctgcagnaacatggatgcccagcctggagcagcagcanccagnatganctggagccaggggggcttc

SEQ ID NO: 2629 - DNA, 488 bp, homo sapiens
  misc_feature (346)..(463): n=unknown
gtatcaaaattaaaagcaaaaattacagggtaagacttaacaaaactactaggagcgtcaaaggaagtgaaaatgggactaggcgcggggcaatatgaattaatgaacatgggaaggacaaggatggggagaacagtgagcatgtgctgaagatactaggggagaggatctggtgaaaaatttgatcttagacaagcgcctaggtaaagaaataatgggataagatttctaaaccccactatgtgcttaagagtcatcctcgccattggcgctgtctctgtcatcctctccttcctcagcctctttttcatcatccttgatcaactccagctggtcatccccccgnnnnnnnnnnnnnnnnnnnnncagtaggtccccctcctcagcagagtcatctgcacccccctcagactccatcttcacattagtctcatctttctttnacgggagctngctgctctgnttcctcttctgacttatcattcttc

SEQ ID NO: 2630 - DNA, 245 bp, homo sapiens
  misc_feature (197)..(197): n=unknown
atttaatagtcatttgtgatatcttagggtaataaaattttaaaatatgtatatgtttttgattgaacagacacaacatgacaatctaatgattaagaagatatgggtcctacgttttgggtctttccagtattgtcaacagtgtaggagttttcgatgggaaatagccatagtcatcaaaaatccatttatttagntttaaaatatactaaaatatttcattgtaatgtggagtacatctgcct

SEQ ID NO: 2631 - DNA, 468 bp, homo sapiens
ttgatataaaaatataattaaaaaattttttttggtggaagacagatgatgctcaaatttcttttccattaagcagttgtttctggtgatgaagaatgatttggtaaagcagttaacaaaacattttccaaagacaccagagggtctgtatagtactgcaaagcaggactgaatcccttctgctgcaaatactggattcgaccttggtcaatcagcaatttacaaagatgccctattttcttcttttcttcaacactaagaagcccaggcaaacaatcagcgccatcatctgtgattctgtatcctccatcatcatgctcttcactatcatcattctgattatcttgcctctttgtggtactatttgaggtttccaaagatgttttccgcatcccacaagttgcccaactactcattcgctggaaataatggaattccactgctccaaggcctagagcctgaaatatt

SEQ ID NO: 2632 - DNA, 507 bp, homo sapiens
ggagccccagccttgggattcccaagtgtttgtattcagtgatcaggactgaacacacaggactcaccatggagttggggctgagctgggttttccttgttgctatattagaaggtgtccagtgtgaggtgcagctggtggagtctgggggaggcttggtacagcctggggggtccctgagactctcctgtgcagcctctggattcaccttcagtaactacgacatgcactgggtccgccaagttacaggcaaaggtctggaatgggtctcagctattggtactggtggtgacacatactatctaggctccgtgaagggccgattcaccatcttcagagagaacgccaagaactcgttgtatcttcaaatgaacagcctgagcgccgaggacacggctgtatattattgtgcaagagaagatcatactaccagtggctggatcgggccccttgactactggggccagggagccctggtcaccgtctcctcagcatccccgaccagcc

SEQ ID NO: 2633 - DNA, 451 bp, homo sapiens
gcgcccaagccgccgccgccagatcggtgccgattcctgccctgccccgaccgccagcgcgaccatgtcccatcactgggggtacggcaaacacaacggacctgagcactggcataaggacttccccattgccaagggagagcgccagtcccctgttgacatcgacactcatacagccaagtatgacccttccctgaagcccctgtctgtttcctatgatcaagcaacttccctgaggatcctcaacaatggtcatgctttcaacgtggagtttgatgactctcaggacaaagcagtgctcaagggaggacccctggatggcacttacagattgattcagtttcactttcactggggttcacttgatggacaaggttcagagcatactgtggataaaaagaaatatgctgcagaacttcacttggttcactggaacaccaaatatggggat

SEQ ID NO: 2634 - DNA, 555 bp, homo sapiens
  misc_feature (548)..(548): n=unknown
aatatttattaagttatgatatattgtctgaatggaaatatactctgtatcacaactctaattataacaatttttacagataatacttcatttatatctctgtaattcaaaagtcattaaattacaacagaattcatatttaagataactttgctataaatatataataatttttaaagtttttctttaatataacatcttgaaatcatgaacatttattttttctggtttacattacatagaatcatgactattttacctgatttgccttaactagctcaatttatcttgtgctatggatttgcactcaaccattctactttcctatgttttaaaagcagcattttagtcaacaattgtgagtgctcatcaccctacatgctgtgaacaaagtcaaggtactttattcttatttcttatcctatattctgtgttacagaaaaactactaccataaacaaagcaccaaccagccacagcagttgtgtcaagcatgacaattggtctagtcttcacattttattagtaagtctatcaagtaagagatgnagggtct

SEQ ID NO: 2635 - DNA, 464 bp, homo sapiens
  misc_feature (373)..(373): n=unknown
gggaaccaccttctgtaggacagtcaccaggccagatccagaagcctctctaggctccagctttctctgtggaagatgacagcaattatagcaggaccctgccaggctgtcgaaaagattccgcaataaaactttgccagtgggaagtacctagtgaaacggcctaagatgccacttcttctcatgtcccaggcttgaggccctgtggtccccatccttgggagaagtcagctccagcaccatgaagggcatcctcgttgctggtatcactgcagtgcttgttgcagctgtagaatctctgagctgcgtgcagtgtaattcatgggaaaaatcctgtgtcaacagcattgcctctgaatgtccctcacatgcnaacaccagctgtatcagtcctcagccagcttctctctagagacaccagtcagattataccagaatatgttctgctcagcggagaactgcag

SEQ ID NO: 2636 - DNA, 421 bp, homo sapiens
  misc_feature (194)..(232): n=unknown
  misc_feature (415)..(415): n=unknown
gcatttcacaaactcaacagagtgccatgataagagctagggatcccccaaactatctcaagcatctaaaaaattgccatttttaaaggcttaaattgtagtagtaaaggggaaaacaggaagtagtagtaaaggggaaaaaaaaccaataaagtatctaaaaaattggcatgttaaaaggcttaaattgctannnnnnnnnnnnnnnnnnnnnnnnnnnnnnnnnnnnnnncacacacatatcattgacttttcttaagacttcagagtactgggtagatgaacactttatacagtatatatcttcagcttaaatttgttttgagtatttttttttatttttaaataagtaggcaaagatttaaaatttttttatttttagtaaatgtttgaggcacactaagacaacttgcgnatattt

SEQ ID NO: 2637 - DNA, 530 bp, homo sapiens
  misc_feature (473)..(508): n=unknown
gtacattacatattagtgctcaaatatatgttcatttccagaatgaatttttgcacagtaatcatatatccatttaatatgtataaagtgttcttggggatgggggtatattcactcactgtaccatgttttatacaggcttcaacatgcaaatttgtttatatcatggccttcaatgatcctccattctcattcctgtagattaagagttcatattgtatatctgaccctgaaatgtacaaacttcacactacaacattcttcatgacactatttgttatgaggaaagttgcagctaaatattagtcatgtgacttaaattttgagaaaatggaaaatgtaataggtataaatttcctgacacatacagcaagacaaatccagcccagcctttgatgatcaacttaaaagctggagatgtcattatcttgttgtgtaaatttgggtctatccctacctttacttctctgtgnctgattttcctcatccactttgaattcggcattcnaattaatccacttttgcctaaa

SEQ ID NO: 2638 - DNA, 295 bp, homo sapiens
  misc_feature (216)..(264): n=unknown
gctgggcctctcagtagctctgtcccttgaaattgcaaatatgggagttgacaggctgacttggaggaggctcatgttccaactattcactcattgtgcaagctacggggcctctttgtgcccagtgccctaggtctggaataacagaatgctgaggggtagacagcaggggggagttgcccccaggttcctgaccagtcctcctacggcttatancacgtcgacatccagaacttctcctccagctngagtgatgggatggcnttctgtgccctggtgcacaacttcttccctg

SEQ ID NO: 2639 - DNA, 445 bp, homo sapiens
  misc_feature (3)..(4): n=unknown
  misc_feature (153)..(153): n=unknown
  misc_feature (277)..(277): n=unknown
  misc_feature (431)..(433): n=unknown
gcnngggggagggtgtcgcaacagacagggcagcggtgggcggacgcacaggcaggagacggtgcccggagagtgggggcggcagttgccactggctggccatgcgggcgggcaggctagacattcttgccgcgcaggcgcagttcgtggcgncgcaggtggttgtagagcgactgcacataggtgaagacacacttggggtcaggcttcttgcccatgatcatcatgtcgtccacctccaccaggggcacacagtccaccagcatccgtggggccncgagcaggggttaggactttttggtttttaccagccccttctggaccagacagcggtagaattcctggatgtacgtgtacacgcacttccagtcaggctctcgaagccgcaccatgtcctctgtatccaggagctgcgggcagtccgcatgggncnccgcagatgaga

SEQ ID NO: 2640 - DNA, 361 bp, homo sapiens
gagagacagaggcaccccggacagagacgtgaagcactgaataaatagatcagaatgactgaaaaagccccagagccacatgtggaggaggatgacgatgatgagctggacagcaagctcaattataagcctccaccacagaagtccctgaaagagctgcaggaaatggacaaagatgatgagagtctaattaagtacaagaaaacgctgctgggagatggtcctgtggtgacagatccgaaagcccccaatgtcgttgtcacccggctcaccctggtttgtgagagtgccccgggaccaatcaccatggaccttactggagatctggaagccctcaaaaaggaaaccattgtgttaagga

SEQ ID NO: 2641 - DNA, 355 bp, homo sapiens
acagtgtctctcacaaaagaagaactccctctggcaggggatgtgactagggactcattgggccagcaacaaccacaaaagaatctaggcattagaatgaactactggaacctgagtcaaagacctgttagtgataatttgcccattttctggcctctagttgcttgaataggggtaagacagggaaatattaaatgattgtgtactgagatggagacgtggaagatctggccctgatggaggatcagagggagcaggttgggtgaaagcccggttttaagcctcttgttctagggaccacgttgagtgacaaggtgggaaaaagatgcatcaataagggaatgtggcagtgttg

SEQ ID NO: 2642 - DNA, 426 bp, homo sapiens
  misc_feature (50)..(50): n=unknown
ggagataagaaatatgactctcttggtagagaagcttgagacactagacnaaaacaatgtccttgccattcgccgagaaatcgtggctctgaagaccaagctgaaagagtgtgaggcctctaaagatcaaaacacccctgtcgtccaccctcctcccactccagggagctgtggtcatggtggtgtggtgaacatcagcaaaccgtctgtggttcagctcaactggagagggttttcttatctatatggtgcttggggtagggattactctccccagcatccaaacaaaggactgtattgggtggcgccattgaatacagatgggagactgttggagtattatagactgtacaacacactggatgatttgctattgtatataaatgctcgagagttgcggatcacctatggccaaggtagtggtac

SEQ ID NO: 2643 - DNA, 372 bp, homo sapiens
gggcaggcagcagctggctgaccaagtccactggaagagaaggcttgtgccagccgggagaaggaagccggggacaggatgaaagcaacaacacctttgcagacagtcgaccggcccaaggactggtacaagacgatgtttaagcaaattcacatggtgcacaagccggatgatgacacagacatgtataatactccttatacatacaatgcaggtctgtacaacccaccctacagtgctcagtcacaccctgctgcaaagacccaaacctacagacctctttccaaaagccactccgacaacagccccaatgcctttaaggatgcgtcctccccagtgcctcccccacatgttccacctccagtcccgccg

SEQ ID NO: 2644 - DNA, 408 bp, homo sapiens
  misc_feature (169)..(250): n=unknown
  misc_feature (372)..(394): n=unknown
actgagtccactctgaacgtgctaaaatgggaaggaggcggtgttttgatgatctgttaaattcttagtgaagtttccttgatttccagtggctgctgttgtttgagtttggtttggagcaaaactgaggtagtcctaacatttctgggactgaatccaggcaagagannnnnnnnnnnnnnnnnnnnnnnnnnnnnnnnaaaggtagggagaaataaanggaggagagaagcacagtgaaagaaaaaanaagtcccttttcgacatcacattcctgtgttttccctcagcctggaaaacatattaatcccagtgcttttacgcccggaaacaaagagactaagccagactatgggggaaagggagataagnaggatcctggaactttaaagangggaaagagtgaga

SEQ ID NO: 2645 - DNA, 346 bp, homo sapiens
  misc_feature (304)..(332): n=unknown
agactcctttgcttttttaaggggaacattccccacctgcagctcgtcctccagctgagaggcagtaggccggctgaggtcatacttctcctcatactcattactaagaattttgtcctgggccttctttttgggaggtttctcctttgctggcttgggaggacctggcaccacatttgggtctcggtggccatgttcccgcctgtccatgcggttgtcccggaaacggcctgggccagcagcccttgtgctgggttctgagatggtggtgggaggggcatttgtgaagctctccaagctggtngccttgctgggnctcctggttngctgtngcctctccctgtgc

SEQ ID NO: 2646 - DNA, 346 bp, homo sapiens
  misc_feature (54)..(54): n=unknown
atgcagtttgcatgcattgatttttgcatctcggctgggtgtagtgggaaagancttaatctatttcatgaagccacatgcagatgtctgcacccccccatggctgcaggctttgctttcagccttctttcaaggaaagcctggggctttctggtttctcatttatatttgtgtctgcagggtgcaacaccggaggatttcagcaacctcccacctgaacaaagaaggaaaaagctgcagcagaaagtcgatgagttaaataaagaaattcagaaggagatggatcaaagagatgccataacaaaaatgaaagatgtctacctaaagaatcctccagatgggagac

SEQ ID NO: 2647 - DNA, 353 bp, homo sapiens
  misc_feature (7)..(351): n=unknown
aaacagncttcgacatatgaagtggggacataannctcttcatcttcatttctccgnatgcgggtncagncatcgcctttgtcttcctctatganatacnatgtntctccttcaactanggaaatngttccttcattctgaccttgcaaatntgtagacagntttgcacgccnctatggcanggaggggctcctcatcatnaaactcgtcgtcaaaatncgtggccancacnttcatctnactctccngactctgctactctgtgtaangcnanntnggctntnanggtcntgcgcgnagttgttgactntgggtangttntggctgtngtacantncgcnctgccggagnga

SEQ ID NO: 2648 - DNA, 505 bp, homo sapiens
gcctcaggaagacttatgttccacgggcctgctcaggaggccttgggatactttgaatcagctggttatcactgtgaggcctataataaccctgcagacttcttcttggacatcattaatggagattccactgctgtggcattaaacagagaagaagactttaaagccacagagatcatagagccttccaagcaggataagccactcatagaaaaattagcggagatttatgtcaactcctccttctacaaagagacaaaagctgaattacatcaactttccgggggtgagaagaagaagaagatcacagtcttcaaggagatcagctacaccacctccttctgtcatcaactcagatgggtttccaagcgttcattcaaaaacttgctgggtaatccccaggcctctatagctcagatcattgtcacagtcgtactgggactggttataggtgccatttactttgggctaaaaaatgattctactggaatccagaacagagctg

SEQ ID NO: 2649 - DNA, 528 bp, homo sapiens
  misc_feature (428)..(428): n=unknown
aatgtatctctttaaaacaattgctgctgtgcaacagtgtgatggcaagggaacagaaaacaacaaaaaaacttgattgaatacttcaatcaaagtgcttcttttttatgtgaggataaatcatactgaattaaggggaaatttaagaatattttttaagaaataacaatttcaggtaggcaattgtgaggaaaataacaatcatacaagccaaggccacgtgattcttccacaagccccagggtgagagatcgatgccctgctttaccaaatattcttcgccagtacatgttgcatagttacaaggattgtttcctgttgcattgagtcctgggcagaagttttgtcccaaaaattcattatgctgcaaagccgtaaatccatatcgtggaatgctgaagtactgaagccatgacagccaagatgcnatggttgtgagattgaccaacagacctgaaaaatcatcataaacacaaaacagatgggcatgagaagtgttgctacagaaaccacactctgacctgctgc

SEQ ID NO: 2650 - DNA, 355 bp, homo sapiens
  misc_feature (37)..(77): n=unknown
ctagtattctactagaactggaagattgctctccganttttgttttgttattttgnttaaaaaataaaaaacttgangccaaagcaattcctattggctcccaggtatttttgctgtgctgtgcaaggaatctgctagctcaagattcacaatgttgaaagcccttttcctaactatgctgactctggcgctggtcaagtcacaggacaccgaagaaaccatcacgtacacgcaatgcactgacggatatgagtgggatctgtgagacagcaatgcaaagatattgatgaatgtgacattgtccccagacgcttgtaaaggtggatgaagtgtgtccaccactatggaggatact

SEQ ID NO: 2651 - DNA, 404 bp, homo sapiens
  misc_feature (189)..(189): n=unknown
  misc_feature (395)..(395): n=unknown
gcccagcctaccatactgattttcaaggcagggtctaacccttcataagatgtgagttcttccaacccaataagcaggcagctttgaggacaaaaaggcaacattaaaagataagaccctagaagtcagaacatctgtattccaaggccaccccttctccttttagtcatgtgactttgggcaggtcancctccctgtctgtaaaatgaggttggactggataatctttatgtgccctttccttttggcttaaaattctgtgatttattcatcttaggaagatcagcatatttattgggatttctgcttcaaaaattctttctaacctcaaaaatccaagtccagaattttttgttttcttctggatttaaactgtttaatatgagcacatcaanggtgacttc

SEQ ID NO: 2652 - DNA, 477 bp, homo sapiens
  misc_feature (375)..(447): n=unknown
ctgttgtgtttacaggcatcatatagaagtgaatattattattcccaaactttcaaacacagaatactcaaaactatataacaacaaccagtaaaacaaaaccattcatcttagggttgaaaggccactcaaaattgcataaaaatacattcagttcacaaagcaagtctggctgcttctccctaaacaaccccaaccccaccccatcccaggtgtatttacagtggactgaagttaatccatacaactcagctgaaaaacagttacatctggtgtgtgaaccttggtggaactagggtgaagggtggagtaaagacacaaaatgctaccactaaaatgggagaggcatggaaacctcagggtggttcttttcanccctgttgatcaaggtcagggcaaagacaagggagggaagggnaaccattaagcccaagtctgagtgtggancactcaactgagcacaggctgtagcttctc

SEQ ID NO: 2653 - DNA, 177 bp, homo sapiens
caaaaccctaactctcttcaattctgtgaaggccaagagaggtgaggaagtttcggaagaaaagttggaagctaacagaggtggattcatgaggtttaaggaaagaagccatgttataacataaaagctcaaagtgatgcagcgagtgctgatgcagaagctgcagcaaattaccga

SEQ ID NO: 2654 - DNA, 342 bp, homo sapiens
  misc_feature (78)..(291): n=unknown
actatactgttgtcaattaattacacagaagctattatgtctaaaaagcaaggtatatagcttaaagtattctattgnnnnnnnnnnnnnnnnnnnnnnnnnnnnnnnnnnnnnnnnnnnnnnnnnnnnnnnnnnnnnnnnnnnnnnnnnnnnnnnnnnnnnnnnnnnnnnnnnnnnnnnnnnnnnnnnnnnnnnnnnnnnnnnnnnnnnnnnnnnnnnnnnnnnnnnnnnnnnnnnnnnnnnnnnnnnnnnnnnnnnnnnnnnnnnnnnnnnnnnnnnnnnnnnnnnnnnctcggtaatttgctgcagcttctgcatcagcactcgctgcatcactttgag

SEQ ID NO: 2655 - DNA, 238 bp, homo sapiens
gtctcaatcaagaagtttattcctggacgaaggaagaaaaggccagatgggaaacaagaacaagcccctgttgaagacgcagggccaacaggggccaacgaagatgactctgacgtcccggccgtggtccctctgtctgagtatgatgctgtagaaagggagaaaatggaggcacagcaagcccaaaaaagcgcagagcagcccgagcagaaggcagccactgaggtgtccaaggagc

SEQ ID NO: 2656 - DNA, 351 bp, homo sapiens
  misc_feature (168)..(168): n=unknown
  misc_feature (303)..(345): n=unknown
tcagtatcagccagggctgagttctggttttcagggtcatcaacatcatcacctttttcatcttctttcggttcaactagtgacttctctattctttctgctaacaaggcatgaccatcatcttctggcacagactttgttccagctccacctccctcttcctcagangggaggacgacctcttccagctgctgatcatttacagtggaaccttctacctcaacagtcatggtcttttctgaggcttcactcatgtctttggaaatatcagaatgtgcttgtcccactgcggttgactctgantcctctttggctgaagtaattggtgtttcntcctgtgcagangcctga

SEQ ID NO: 2657 - DNA, 273 bp, homo sapiens
  misc_feature (52)..(149): n=unknown
  misc_feature (268)..(268): n=unknown
ggcccaccatgtgagcaggaataagagagggcaagtggttggaacaaggggngggntccgaggatgtaccgngtggctaacaggtctctctggtgctggaaaaacaacgataagttttgccctggnggngtaccttgtntcccatncnntcccttgttactcccatgacggacattgtccccatccagggagtaacaagggatggcatgggagacaaggtactcctccagggccttaacagaaatctcggattctctcctggggacanagagg

SEQ ID NO: 2658 - DNA, 512 bp, homo sapiens
  misc_feature (5)..(497): n=unknown
tcagnatccgagaaggnnnctttnnnancacnnncncntcgacnaactttgttaagcagctgaaanggantctgagccagntcctgtgttgtncngtgtanancnnggnaccagantgggagtcaagtggcctgggngcttcnncantgcnaccagcacttcctaataatggcanatttncatttngttacggtgctcacagnttacaanncacatacntgtgcntcatcacagtttgtccaccngtaagatgaaagggttggantntntgncttctgtggtttttccagttctagtgacttgntagtctgatagtntnaattattttttantacagctggcgctgctgctgncatcagggccatcctttctgcaagancacaatnatccacagcaaagagcgggaaagataaantttccacgagattcgccaacattgtttgangtcntttcatcaaatcactgtatgntattaaaagtcaccgtgtnactggagntaccttattcacaga

SEQ ID NO: 2659 - DNA, 384 bp, homo sapiens
cccacagatatcgaggaaaatcgaactatgctcttcacgattggccagtctgaagtttacctcatcagtcctgacaccaaaaaaatagcattggagaaaaattttaaggagatatccttttgctctcagggcatcagacacgtggaccactttgggtttatctgtcgggagtcttccggaggtggcggctttcattttgtctgttacgtgtttcagtgcacaaatgaggctctggttgatgaaattatgatgaccctgaaacaggccttcacggtggccgcagtgcagcagacagctaaggcgccaccccagctgtgtgagagctgccccctgcaaagcctgcacaagctctgtgagaggatagagggaatgaattcttccaaa

SEQ ID NO: 2660 - DNA, 367 bp, homo sapiens
  misc_feature (63)..(63): n=unknown
  misc_feature (275)..(306): n=unknown
aaagctactgtgtacagtaatcaggactggagaagggacgatttagtatctaaaaacaacaanaaaaacactgggacatgccccctgaattgcaagttggagttcgtaagaatctacttgctggcaagccggtttcctccctgagaagcacacttcccgcttccttctctccttccagcgtcttctgtccctctcagttaaggcctggacagtgtgggatggtgttgcaatctctcctgcagagctgtcagtcgcccgtgggctcgggctgcgtncaactcaggctcccggtcgctgggcctcngngctccgccgccgcagctcctccaccgtctgcagcagggccgcccgctccagttctaaggta

SEQ ID NO: 2661 - DNA, 512 bp, homo sapiens
  misc_feature (355)..(382): n=unknown
  misc_feature (507)..(507): n=unknown
gtggtggactaattaaagacataaagaggaaagcgccattttttgccagtgatttttatgatgctttaaatattcaagctctttcggcaattctcttcatttatctggcaactgtaactaatgctatcacttttggaggactgcttggggatgccactgacaacatgcagggcgtgttggagagtttcctgggcactgctgtctctggagccatcttttgcctttttgctggtcaaccactcactattctgagcagcaccggacctgtcctagtttttgagaggcttctatttaatttcagcaaggacaataattttgactatttggagtttcgcctttggattggcctgtggtncgccttcctatgtctcattttggnagncactgatgccagcttcttgggttcaaatacttcacacgtttcacggaggagggcttttcccctctgattagcttcatctttatccatgatgcttcaagaagatgatcaagcttgcagattactancccat

SEQ ID NO: 2662 - DNA, 587 bp, homo sapiens
  misc_feature (320)..(320): n=unknown
  misc_feature (506)..(552): n=unknown
tgacatcatccaggaagctgaggtcatgctgggagaagaggtagtccatgccttttctgacagctacaagtgccaagatcattactggaaaaatgatagcagccaccgttgacttgaggatccaaagcagggccagacacaacacctgcaggaaagtgaacaggtggactctgcgcagaggaacatgacgcaggtagatgaagtcaggctgatgcttcagaggcatcagaagcagcttcagacgatccatgaactgcacaccattaagggatgctactcccatatacaggaacacaccatagagtacaggcatgggtatnaacttcaagatgggagccataaagactgacagaccagtcagaataaacacaagggttccagtgactctttgttccctcactcctagaaactttggttgttctccaggtgcagaagtctctgtctccatcttcaaactgtcgatgtgagcaatggagatgaccgtagcagctacataccaccggaanagccatgagggagcatataaccatgaggattgccacccaaaagannttcaagtgataccctgctcctttcttgagtttatg

SEQ ID NO: 2663 - DNA, 475 bp, homo sapiens
  misc_feature (73)..(107): n=unknown
  misc_feature (316)..(468): n=unknown
agaaggcaaatgtgccgagcttgaagaagattgaaaactgtgaccgaacaacttgaagtcactggaggctcangctgagaagtactcgcagaaggaagacagatatnaggaagagatcaaggtcctttccgacaagctgaaggaggctgagactcgggctgagtttgcggagaggtcagtaactaaattggagaaaagcattgatgacttagaagagaaagtggctcatgccaaagaagaaaaccttagtatgcatcagatgctggatcagactttactggagttaaacaacatgtgaaaactccttagctgcgancacattctttcatttgntttgntttgnnttgnttttaaacacctgcttaccccttaaatgcaattatttacttttancactgtcacagaaacatcccacaagataccagctaggtcagggggtggggggaaacacataccaaaaaggcaagnccatgtc

SEQ ID NO: 2664 - DNA, 596 bp, homo sapiens
  misc_feature (577)..(577): n=unknown
tatacaatgtttacatatagttaaaactctcaagaaaacgtcctttaccagttgtatgtggtgtctaaatctttaacatgaaggactgaaaagagtggaaatccacactgattgttatcctacagattgtcatgagctgcacgtgtgccaatcagaaaggaatggaagtctcagaagagcagcgtggcttacagacccttggctttagtgaattcaggcatgcgggatccatagtctcatcttgtagtaaaactcaagacaaaataaattagtgttggacagagttctacattgtacaatgttgaacaaaagaccacagggggaccttttgttcaaagtagcaccaatccacacctgattgtgtttccaacattaaccttcctgttgactctatcattggcactttgaatggaacttctcctgctttagtgaggattcctacgctgactaagcacactgtgttgctaaactctctacaaagtgtggcagcatcaacccgggaaatggcacatttgaaccaggatcgccctgacatggggcttgctttttgtatgtgtttccccaaccccctgacctngctgggaatcttgtgggat

SEQ ID NO: 2665 - DNA, 467 bp, homo sapiens
gtttctccagacctctggtgtaataaactgccatcttcctttctagatctatgttagcgttcctggatccaagaaggtcatccttgacctgcccctggtaattggcagcagatcaggtctaagcagcagaacatccagcatggccagccgaaccagctctgagatgagttgggtagatctgaacatccctgataccccagaaggtgagccagacctaatgtcttttctttgtttctggtctacctgggtttgtaaaattgtgatggtccagcatttcttgggcaggattcttatgtggccatattttcttttctagctcctccctgctatatggatgtcattcctgaagatcaccgattggagagcccaacccactcctctgctagatgacatggatggctctccaagacagccctatctttatgtatgcccctgagttcaagttcatgccaccaccgacttatact

SEQ ID NO: 2666 - DNA, 504 bp, homo sapiens
  misc_feature (437)..(486): n=unknown
ctccttttcccaaagttttggccacaatttcccttttcatcttcctagtttgttaaattggctcttctccacatgatacgtaagttcaaggtccaaagttcctatcacaatttacaaaaagcctccaaaaaaccttgaaaagcttacgccaggaggccatttttacctgacccgaaactatcgaaaaggcctcaattttcaaggagatctgagaaaatggatgggcctgagtttttctagttatttttaaacccatccaacaaacacccctgtatcacaacatgggcgctggctgaggatgagtccgcatcctttaaggcccaggagattgcctgctgaccacctcctacattaggaagtcagaggctaaggtggacccacactccattgcagagaactgttgagtctctgaaaaagtgagtgtccaggaagagagncnaaaagaaacaagtaggtaaagcngcttcttttcttccaacatgctcnctgcaccattgttgttga

SEQ ID NO: 2667 - DNA, 559 bp, homo sapiens
agaaaggagccctgtattgtgagctgtgctatgagaaattctttgcccctgaatgtggtcgatgccaaaggaagatccttggagaagtcatcaatgcgttgaaacaaacttggcatgtttcctgttttgtgtgtgtagcctgtggaaagcccattcggaacaatgtttttcacttggaggatggtgaaccctactgtgagactgattattatgccctctttggtactatatgccatggatgtgaatttcccatagaagctggtgacatgttcctggaagctctgggctacacctggcatgacacttgctttgtatgctcagtgtgttgtgaaagtttggaaggtcagacctttttctccaagaaggacaagcccctgtgtaagaaacatgctcattctgtgaatttttgaaagtcaacagttcaggagaagagaaggaatttgaagagaaaaaggaaaattaaaattactaattaatttttagattcaatatttatatggagttttgaaaaataatagtgggccctgaaggaataaattccagctttaaaaacccaagt

SEQ ID NO: 2668 - DNA, 273 bp, homo sapiens
accgcgctcagcctacaagcaattttttaaaaactgacacctattactgataaaattctctgtttaaaatcctatttactattttaaagataagtattagtttttttttaaatacaataattctgttattgataaaatttaaggcattttcattgccttttgcagatttactcataactacctaacaaggaaagaaggtataattatttcagattggattatttattctaaaattaaattcttcactaatttattctaagatgaatttaatag

SEQ ID NO: 2669 - DNA, 203 bp, homo sapiens
  misc_feature (42)..(192): n=unknown
ggccaacggcagatccgtgcctcccagcatggttcagatgtngtgattgagaccgacttcggcntgcgtgtggcctannaccttgtgnantatgtgcgggtcaccgtccctggaaactactancagntgatgtntggcnngtgtgggnnctacaacggcgaccccaaggatggnttncagaagcccaatggntcgcaggcagg

SEQ ID NO: 2670 - DNA, 612 bp, homo sapiens
  misc_feature (350)..(350): n=unknown
  misc_feature (527)..(610): n=unknown
gtgacccagaaaagcggtagagcagggtaggagcacatgatgcatccttcagccactgcaacctccagagggaccaggtcttcttcaggaaatcttcgttcctggtggatgactgatcagccataacatggggagaagtcctgcgctctccatttctccatcgctggcttctcctgggagtcatgccaatcattggtctggtccccgtcaaagtttccacaggccccacacagtttcccagcatggtcattgctgacaatcacagccaccttcccattggctccaagccacacctggacccctgccttctggcggactagcagggagccatcaggtgtacgactcacggncacagatgctaacttctcagctgggagatccactcggagaccattcacccacacacccttgtttggagtcaacgtcaccatcccatcctggaagaagatgtggacctggcccacagcctccgttttgccatggcagatctggacttcggcaactacacggtaccaggggatggtatnctgtagtcctgggcagngggaagagagctcatagacaccaggagaggtggtggcaccacgggccccatcaaaggtggtgaggntg

SEQ ID NO: 2671 - DNA, 369 bp, homo sapiens
tcaggacacagcatggacatgagggtccccgctcagctcctggggcttctgctgctctggctcccaggtgccagatgtgtcatccaattgacccagtctccatcctccctgtctccatgtatgagagacagagtcaccttcacttgccgggcaagtcaaggcattagtgcggctttaacctggtgtcaccagatgccagggaaaactgctaagttcctgataaatggtgcctctaccctggaaagtggggtcccatcaaggttcagcggcagtagatctgggacagatctcactctcaccatcagcagcctgcagcctgaagattttccaattattactgtcaaacagtttaaaagttattccgatgac

SEQ ID NO: 2672 - DNA, 533 bp, homo sapiens
  misc_feature (24)..(99): n=unknown
  misc_feature (516)..(516): n=unknown
ttagcataattaaagccaacctangaggaggggggtgaggtgaaagatgagctggaggaccgcaataggggtaggtcccctgtggaaaaagggtcagangccaaaggatgggagggggtcaggctggaactgaggagcaggtgggggcacttctccctctaacactctcccctgttgaagctctttgtgacgggcgagctcaggccctgatgggtgacttcgcaggcgtagactttgtgtttctcgtagtctgctttgctcagcgtcagggtgctgctgaggctgtaggtgctgtccttgctgtcctgctctgtgacactctcctgggagttacccgattggagggcgttatccaccttccactgtactttggcctctctgggatagaagttattcagcaggcacacaacagaggcagttccagatttcaactgctcatcagatggcgggaagatgaagacagatggtgcagccacagttcctatgttttgtctccggtcgtgtcccttggccgangtcatcggaataacttt

SEQ ID NO: 2673 - DNA, 240 bp, homo sapiens
  misc_feature (146)..(201): n=unknown
caaatgtatagcctaagagacacagacacggccgtctatttttgtacgagagaagaggttaccattccgattgccttttggggccaggggacccgggtcaccgtctcttcagcatccccgaccagccccaaggtcttcccgctgancctctgcagcacccagccagatgggaacgtggtcatcgcctgcctggtccagggnttcttcccccaggagccactcagtgtgacctggagcgaa

SEQ ID NO: 2674 - DNA, 536 bp, homo sapiens
  misc_feature (109)..(212): n=unknown
gctcagtagcaggtgccgtccacctccgccatgacaacagacacattgacatgggtgggtttacccgccaagcggtcgatggtcttctgtgtgaaggccagcggcaggncctcgtngcccaccatgcaggagaaggtgtcccccttcttccagtcctcggctgccacgcgcagtatgctggtcacagcgaaggtggtggtgccctggctggnctcctgccgggatgcccaagtcaggtacttctcgcggggcagctcctgtgacccctgcagccagcgaaccagcacgtccttggggctgaagccgcgtgccaggcacgtcagcgtcaccagctcgttcagggccagctcctccgacggcggcggcagcaggtggacctcgggccggaatgtgtttccggattttgagagggtggcggttagcggggtcttggactcggggtaggcagcagtgcaagtgaaggtcttcccatggttccatggctcggcacagcccggcaggacactggacacgtgtagcaaccacagaggtcacgc

SEQ ID NO: 2675 - DNA, 487 bp, homo sapiens
  misc_feature (448)..(448): n=unknown
gtggcttatttcgtttttgatggaagtaaagaattttatgcagattccgtgaagggccgattcaccatctccagagacacatccaagcagacgatttttctgcaaatggacaacctgagagccgaagacacgggtctctattactgtgcgcgagattctaatgtctttgatactaatggcagctttgacttttggggccaggggaccgtggtcaccgtctcttctgcatccccgaccagccccaaggtcttcccgctgagcctctgcagcacccagccagatgggaacgtggtcatcgcctgcctggtccagggcttcttcccccaggagccactcagtgtgacctggagcgaaaggggacagggcgtgaccgccagaaacttcccacccagccaggatgcctccggggacctgtacaccacgagcagccagctgaccctgccggccnacacagtgcctagccggcaagtccgtgacatgccacgtg

SEQ ID NO: 2676 - DNA, 483 bp, homo sapiens
  misc_feature (5)..(7): n=unknown
  misc_feature (454)..(454): n=unknown
gcggncngctcagtagcaggtgccgtccacctccgccatgacaacagacacattgacatgggtgggtttacccgccaagcggtcgatggtcttctgtgtgaaggccagcggcagggcctcgtggcccaccatgcaggagaaggtgtcccccttcttccagtcctcggctgccacgcgcagtatgctggtcacagcgaaggtggtggtgccctggctgggctcctgccgggatgcccaagtcaggtacttctcgcggggcagctcctgtgacccctgcagccagcgaaccagcacgtccttggggctgaagccgcgtgccaggcacgtcagcgtcaccagctcgttcagggccagctcctccgacggcggcggcagaggtggacctcgggccggaatgtgtttccggattttgagaaggtggcggttagcggggtcttggactcggggtagggancagtgcaagttaaagtcttcccatggttc

SEQ ID NO: 2677 - DNA, 493 bp, homo sapiens
  misc_feature (157)..(166): n=unknown
ggcgggccccgtctgaggtctggcagtcagagacagccgggcgcccacggcccgagcgcccacggcagcaccatgcccgcactcctggagcgccccaagctttccaacgccatggccagggcgctgcaccggcacattatgatggagcgggagcgcnaacgtcnangaggaagaagaggtggataagatgatggaacagaagatgaaggaagaacaggagagaaggaagaaaaaggagatggaagagagaatgtcattagaggagaccaaggaacaaattctgaagttggaggagaagcttttggctctacaggaagagaagcaccagcttttcctgcagctcaagaaagttttacatgaggaagaaaaacggaggcgaaaggaacagagtgacctgaccaccctaacatcagctgcataccagcagagcctgactgttcacacaggaactcatctcctcagcatgcaagggagccctggaggacacaatcgc

SEQ ID NO: 2678 - DNA, 527 bp, homo sapiens
gacatgtgatactcttgggatggctgatgttggaactgtgtgtgatccgagcagaagctgctccgtcatagaagatgatggtttacaagctgccttcaccacagcccatgaattaggccacgtgtttaacatgccacatgatgatgcaaagcagtgtgccagccttaatggtgtgaaccaggattcccacatgatggcgtcaatgctttccaacctggaccacagccagccttggtctccttgcagtgcctacatgattacatcatttctggataatggtcatggggaatgtttgatggacaagcctcagaatcccatacagctcccaggcgatctccctggcacctcgtacgatgccaaccggcagtgccagtttacatttggggaggactccaaacactgccctgatgcagccagcacatgtagcaccttgtggtgtaccggcactctggtggggtgctggtgtgtcaaaccaaacacttcccgtgggcggatggcaccagctgtggagaagggaaatggtgtat

SEQ ID NO: 2679 - DNA, 519 bp, homo sapiens
  misc_feature (501)..(501): n=unknown
tactctattttatatgcacttccacaaaagcgatataatttaaaagtttttttcattagaaataaatgtataaaaataaatatgttattataggcatttattactaactatagtccttcttggaaggaacacccaaaccaatacttataaagtacatgtaatttatagtaacatattttactatatacatatggaaaaaatcatattctcacagaagagctgaacagacattcaccaggatacgactgttggaccagctgctggagatggacctgctacccctcagcagcctccccaccacaagacaagtgatctcaatgtccccaaacctgtgggaccctgttctccacacctcatttttgttccggcgtttcatcctccttgtgtgattgtactgattttcatgagacacaagttacttctttacatccatattcccaaagcagggttacatggtaggaaagaaaggaagttggaggtactaagctcattgggtctccnctagcttttaccagcatc

SEQ ID NO: 2680 - DNA, 338 bp, homo sapiens
  misc_feature (332)..(332): n=unknown
gcaagatctccgaatacaccctcacggaggtctccatcaactgggtgcgtcaggttcctggaaaaggtcttgaatggattggaggttttgtccccgatgatggtaaagtgatttactcacacaaattcgaggggagagtcgacatgaccgaggacactttctcagacacagcctacatagagttgtacaaccttcgatctgaggacacggccatttattattgtgtagtctggaatttgattctgtctcgcgccctccgtcgactcgacccctggggccagggaactctaattactgtctcatcagcatccccgaccagccccaaggtcttnccgctg

SEQ ID NO: 2681 - DNA, 586 bp, homo sapiens
gctcagtagcaggtgccgtccacctccgccatgacaacagacacattgacatgggtgggtttacccgccaagcggtcgatggtcttctgtgtgaaggccagcggcagggcctcgtggcccaccatgcaggagaaggtgtcccccttcttccagtcctcggctgccacgcgcagtatgctggtcacagcgaaggtggtggtgccctggctgggctcctgccgggatgcccaagtcaggtacttctcgcggggcagctcctgtgacccctgcagccagcgaaccagcacatccttggggctgaagccgcgtgccaggcacgtcagcgtcaccagctcgttcagggccagctcctccgacggcggcggcagcaggtggacctcgggccggaatgtgtttccggattttgagagggtggcggttagcggggtcttggactcggggtaggcagcagtgcaagtgaaggtcttcccatggttccatggctcggcacagcccggcaggacactggacacgctgtagcagccacagaggtcacggtcaggtggtccttgaacagcgctcttcccacttgagggcgtccaggtga

SEQ ID NO: 2682 - DNA, 364 bp, homo sapiens
  misc_feature (330)..(330): n=unknown
cccagacggaaccatgcaagccccagcgcaccttctcttcctcctgctcctctggctcccagtttcagacactgttggagaagttctgatgacacagtctccagtcattctgtctgtgtctccaggagaaagagtgactctctcctgcagcgccagtcagtctattggtaccaagttggcctggtatcaacaaaaacctggccagtctcccaggctcctcgtttatggtgcatctgtcacggtcactggtattccagacagattccgtggcggtggctctgagacacatttactctcaccatcggcagcctgcagtcggaagactctggnacttattctgtcaccaatactttgagtggccctc

SEQ ID NO: 2683 - DNA, 546 bp, homo sapiens
aaagatgagctggaggaccgcaataggggtaggtcccctgtggaaaaagggtcagaggccaaaggatgggagggggtcaggctggaactgaggagcaggtgggggcacttctccctctaacactctcccctgttgaagctctttgtgacgggcgagctcaggccctgatgggtgacttcgcaggcgtagactttgtgtttctcgtagtctgctttgctcagcgtcagggtgctgctgaggctgtaggtgctgtccttgctgtcctgctctgtgacactctcctgggagttacccgattggagggcgttatccaccttccactgtactttggcctctctgggatagaagttattcagcaggcacacaacagaggcagttccagatttcaactgctcatcagatggcgggaagatgaagacagatggtgcagccacagttcgtttgatgtccagcttggtcccctggccaaaagagtacgagggccactcaaagtattggtgacagaagtaagttccagagtcttccgactgcaggcttgcgatggtg

SEQ ID NO: 2684 - DNA, 476 bp, homo sapiens
aggaggacagggtgctgggacagggagagggaatgaccagaatatgccacaactaggggtgtgcttgcccgcacacagcagggatgggatatgccgagaataacacgccacgctcacagggcccactgagaggcctcccttgaattggggacaactcttggccctggtttggccatttttttgtgagagacgggggcaggccctggcttggagtcttgtttatacgttcttgatgttcatctcctctctcctgtcttctcacaggcaaagacatggcagcagtgcagaggaccctgatggctttgggcagcttggcagtgaccaagaatgatgggcataccgtggagatcccaactggtttatgaagaaagcgcaggagcataagagggaattcacagagagccagctgcaggagggaaagcatgtcattggccttcagatgggcagcaacagaggggctcccaggccggcatgac

SEQ ID NO: 2685 - DNA, 285 bp, homo sapiens
ggaagtcaaaaaacacctgcagccttactgtccccttggaaacaagatgaacatctacattttctaaagtgggacaagaatctctgttcatatttatgtcccatgcatttgcacgtggccggacaaaggactttgcttctgccagcacatctgtcttcagatatgagaggaaacagacacaacctggaggcggcaaagaagcagctctttctcaagtgacctcctctatctccctacttcctggctaatggggcagccttgatccttgggaatccaggacagata

SEQ ID NO: 2686 - DNA, 185 bp, homo sapiens
  misc_feature (18)..(180): n=unknown
attaaagccaaggaggangaggggggtnaggtgaaagatgagctggaggaccgcaataggggtangtcccctgtggaaaaagggtcagaggccaaaggatngganggggtcaggctggaactgaggagcaggtgggggcacttctccctctaacactctcccctgttgaagctctttntnacggg

SEQ ID NO: 2687 - DNA, 528 bp, homo sapiens
  misc_feature (452)..(452): n=unknown
actgcacaggtcaggatggccctcagcaccctgacctccagctcactgataccacctcccagacttatgccaggaatgtccttccctcttttcttgactccagccggtaatgggtgtctgtgttttcagggtctttatcccaggttgtgctgactccaccgccctccgcctctgcttccctgggagcctcggtcaacctcacctgcaccctgagcagtggactcaggtttgcgccatcgcgtggcatcagtgacagacagagaagggcccacggtcgttgatgaaagtcaacaatgatgacaatcatatcaacggggacgaaattcctgctcttctctgactcgagtccgggacttaccactagtccaacatgtccagtctccggtctgaggcggggcctgactcttactgtcacacctgggacactggatttagttgggtgttcggcgganggactaggtgactgtcttacgtcagcccaaggctgccccctcggtcactctgttccaacctctctgaggagttcaa

SEQ ID NO: 2688 - DNA, 252 bp, homo sapiens
  misc_feature (101)..(132): n=unknown
  misc_feature (252)..(252): n=unknown
tgagtgcagggagaagggcttgatgccttggggtgggaggagagacccctcccctgggatcctgcagctctagtctcccgtggtggggggtgagggatganaacctatgaacattctgtaggggcnactgtnttctccacggtgctcccttcatgcgtgacctggcagctgtagcttttgtgggacttccactgctcaggcgtcaggctcaggtagctgctggccgcgtacttgttgttgctttgtttggan

SEQ ID NO: 2689 - DNA, 356 bp, homo sapiens
taataattaacatttagttatatttataatttccagatgacaaagtatttcatcaaataacttcatttgatgttccatgatcaagaaagaatccctatctctattttacaagtaattcaaagaggccaaataacttgtaaacaagaaaaggtaacttgtcaacagtcataactagtaattatgagagccttgtttcataaccaggtcttcttactcaaatcctgtgatgtttgaaataaccaaattgtctctccaatgtctgcataaactgtgagagccaagtcaacagcttttatcaagaatttactctctgaccagcaataaacaagcactgagagacacagagagccagattc

SEQ ID NO: 2690 - DNA, 491 bp, homo sapiens
atattctgagagtgtctatagcacttagtgtctgcttcatataaactaccagttattatatatttatgatgcaagtagttttccaaatgtggtgaaagtctgagtctttttatccccatgggtaaaatctgaatctggctctctgtgtctctcagtgcttgtttattgctggtcagagagtaaattcttgataaaagctgttgacttggctctcacagtttatgcagacattggagagacaatttggttatttcaaacatcacaggatttgagtaagaagacctggttatgaaacaaggctctcataattactagttatgactgttgacaagttaccttttcttgtttacaagttatttggcctctttgaattacttgtaaaatagagatagggattctttcttgatcatggaacatcaaatgaagttatttgatgaaatactttgtcatctggaaattataaatataactaaatgtaattattactcgag

SEQ ID NO: 2691 - DNA, 353 bp, homo sapiens
  misc_feature (157)..(417): n=unknown
aatcactctgactgacaaccagagaaagctctttttcagacgccactaccctctcaacactgtcaccttctgtgacctggatccacaggaaagaaagtggatgaaaacagagggtggtgcccctgctaagctcttcggcttcgtggcccggaagcanggcagcaccacggacaacgcctgccacctctttgctgagcttgaccccaaccagccggcctctgccancgtcagcttcgtctccaaggtcatgctgaatgccggccaaaagagatgaaccctgccccttgcccagggccantgccatggggaaggggcttgtngggagggganccatgaatcctgaccactcttga

SEQ ID NO: 2692 - DNA, 510 bp, homo sapiens
tcatgtatatattatataatatttatatatcagtacaatgcctctctctaggggactcgcataggcttaagaatggagtcctggtgaattttccattctggcttagagtccttaaatggtggtcaggtgttttcccaactgtccagtggaccttaggccctttggcccaagtgcaagccttctgccctctgctgcatgggcagcgtggctcagctagggaaaccaaggcagaaagggtgacagtgaggctttggcattgtaggtaggcgatgtggtgtacaggcagcaggcccaggagctctgctgaggtcagagggtgcctgcaaaagccagaccctaaaacacttacagaggggaggataaggactccaggtttctggccggagcctcactgagcagaaagtaggttccccagggagaattccaacacagggaccctgcagaatagaacagggctgggcagagcagcaagactcaatccccagcccccaaaaaaggcatcatgcaggt

SEQ ID NO: 2693 - DNA, 427 bp, homo sapiens
  misc_feature (417)..(417): n=unknown
cacactgagtgatgtctggtcttatggcattctgctctgggagatcttttcccttggtggcaccccttaccccggcatgatggtggattctactttctacaataagatcaagagtgggtaccggatggccaagcctgaccacgctaccagtgaagtctacgagatcatggtgaaatgctggaacagtgagccggagaagagaccctccttttaccacctgagtgagattgtggagaatctgctgcctggacaatataaaaagagttatgaaaaaattcacctggacttcctgaagagtgaccatcctgctgtggcacgcatgcgtgtggactcagacaatgcatacattggtgtcactacaaaaacgaggaagacaagctgaggactgggaaggtgtctggatgagcagagactgancgctgacagt

SEQ ID NO: 2694 - DNA, 492 bp, homo sapiens
  misc_feature (385)..(455): n=unknown
ttcatttacacgttttaaaacaaaaacatgaacaggggcattcgtaatacattttgtattggtagaccctatcaagttagtttttctcacacattcaccacaccattgttttgggaacatgtaagtatctttctttttattatttctaaaatataaattttggacattcaaaagtgcaacagttaatgtgcctgtggggattatcacagttaaaaaaatataaacgaaggcagtgatacagcttgtcataaatgttttggcagtattctccaagtctatatagaaatacatatatacatattgatgtataacatcattttatcttatgtccctcttcacaaaaataggaccattttgtacagattggcagaccacattttaaggncatcactaatcgttaaaaagtcacaaatagtgtttctcaggccggctttgattgtcacataaaantaganagtaggaaagattggcaaatttctctggagactttgc

SEQ ID NO: 2695 - DNA, 439 bp, homo sapiens
aaaacaccatacccatggtgacaccacctcctccacctgtcttctcattgctgaagatcagtcaaagaattgtgtgcttagttcttgataagtctggaagcatggggggtaaggaccgcctaaatcgaatgaatcaagcagcaaaacatttcctgctgcagactgttgaaaatggatcctgggtggggatggttcactttgatagtactgccactattgtaaataagctaatccaaataaaaagcagtgatgaaagaaacacactcatggcaggattacctacatatcctctgggaggaacttccatctgctctggaattaaatatgcattcaggtgattggagagctacattcccaactcgatggatccgaagtactgctgctgactgatggggaggataacactgcaattcttgtattgatgaagtgaaacaaagtg

SEQ ID NO: 2696 - DNA, 503 bp, homo sapiens
tactcagatagatgattttaatttcttgatgcaatttgaaatatcatttcagaaaactgttgcatcaaataatatacaaccaggtatcagtatgaaaaaggatctttgttcatcactatttcttacaaataaaataacaaataaatgaaactattaaattttaatcttgacagtttttacatatccatgagtgtttttatttaatcaaagtatccttttccgacatcttaaaattatttttatgagtttatgatcacacatgggatgaattttaagattcagaaatatcctttacttacattgttttgttttttaaaactctcttctaggtctacttgaagatttttttcttcgttaaggttcaaatggtggtacttaaaataaagttaacaattacaacagacccaatcacagacaataccagcgtgaaatattaactccagaattatgacttttatcaggagtaggagtaggagtaggagtaggtgtaggtccatggtcat

SEQ ID NO: 2697 - DNA, 466 bp, homo sapiens
  misc_feature (88)..(88): n=unknown
  misc_feature (408)..(408): n=unknown
ggggcgtcaatgacaatttccagggggtgctgcagaatgtgaggtttgtctttggaaccacaccagaagacatcctcaggaacaaagngctgctccagctctaccagtgtcctcctcacccttgacaacaacgtggtgaatggttccagccctgccatccgcactaactacattggccacaagacaaaggacttgcaagccatctgcggcatctcctgtgatgagctgtccagcatggtcctggaactcaggggcctgcgcaccattgtgaccacgctgcaggacagcatccgcaaagtgactgaagagaacaaagagtttggccaatgagctgaggcggcctcccctatgctatcacaacggagttcagtacagaaataacgaggaatggactgttgatagctgcantgagtgtcactgtcagaactcagttaccatctgcaaaaaggtgtcctgcccccatcat

SEQ ID NO: 2698 - DNA, 322 bp, homo sapiens
  misc_feature (232)..(298): n=unknown
cagctactcctcttccagtgcccgccggccctcgctggactccatggagaaccaggtctccgtggatgccttcaagatcctggaggatccaaagtgggaattccctcggaagaacttggttcttggaaaaactctaggagaaggcgaatttggaaaagtggtcaaggcaacggccttccatctgaaaggcagagcagggtacaccacggtggccgtgaagatgctgaaaganaacgcctccccgantgancttcgagacctgctgtcagagttcaacgtcctgaagcaggtcaaccanccacatgtcatcaaattgtatggg

SEQ ID NO: 2699 - DNA, 251 bp, homo sapiens
  misc_feature (3)..(246): n=unknown
aanantancatnaannatatctnanaaccaanagtttaccatgtctatanntatttgtaananaacttatnanagtgtatctnanaaacancccaaattagggccaggttacgtgtccaataagcatttttcaaactctccctctgggtgtgtgcgnacacnncatnaggctctattacacacgnatccaagccnnggcctcacacaatgccacaantttnctgtttgtgcgaaatgnctatatanaatac

SEQ ID NO: 2700 - DNA, 293 bp, homo sapiens
  misc_feature (63)..(63): n=unknown
  misc_feature (179)..(290): n=unknown
gcccgggcggctgcccttgggtgctcccttccctgcccgacacccagaccgaccttgaccgcncacctggcaggagcaggacaggacggccggacgcggccatggccgagctcccggggccctttctctgcggggccctgctaggcttcctgtgcctgagtgggctggccgtggaggtnaaggtacccacagagccgctgagcacgcccctggggaagacagccganctgacctgcacctacagcacgtcggtggggaganagcttcggccctgggagtggagctttgtngca

SEQ ID NO: 2701 - DNA, 525 bp, homo sapiens
ccgccctcagggatcgggagaagtcacacgaccatagggagcttggacttggtggtcgtcacggtgctggcagacgagggtctttccaggaaccccttgctagaatcagccctcatacaagtgtgctcagagatcccaggagcgatggcatcctcccgaagtcactacccccatatgtctccttgggcttcttccccctctctttctggaacctgaccaggcagaacgcagcaactgacagcaacagcacgcccaggagcaccccaatcagagctccggccactcggccttgggagggttcggtcacagagagggtcagctcacaggatgcactgcccatctggttggtggccacacagcggtaggtgcccgaggaggtcagggagaggttggtgagaatgagctggccagacacctcatcttgaaccatgctgccaggagaaggtgtaggaaaagttccaagacgcacccagttgtacactggcttaggagccccctcggaagagctgcatctcagtgcagtag

SEQ ID NO: 2702 - DNA, 381 bp, homo sapiens
agcatacccggcaggggctgtccccaggcccaacaagcaaagggcccagtagcgagggccactggagcccatctccggggggctgggcaggaagtagggtggggtttggggtagggatctggtaccctgggactgctgcaactcaaactaaccaacccactgggagaagatgcctgggggtccaggagtcctccaagctctgcctgccaccatcttcctcctcttcctgctgtctgctgtctacctgggccctgggtgccaggccctgtggatgcacaaggtcccagcatcattgatggtgagcctgggggaagacgcccacttccaatgcccgcacaatagcagcaacaacgccaacgtcaactggtggcgcgttctcca

SEQ ID NO: 2703 - DNA, 539 bp, homo sapiens
  misc_feature (293)..(530): n=unknown
cagatcagggaggagggggtgacactaacgaggctgctacaatcagctcccctagaggcagcgattaagggctcattacccgctggggtgaggggagcctgggaaaggcagcggggcggggggattaggttaggaggtggggcagtttagagggaagaagagtgggacacccccaggggagtccaaggaggcctggcctggagaagagtgaggttaccctcccaccccccactgggggaatatgactaaggaagcccccagaagggctgaaaggagaatgtcccagggaagtnagctgagacactggagctgggtgcacagcaggcgggggcagcctggcaggagtaggggtgtcacggcttctccagctggacatctcctatgttgangctgcccacatcctggtaggtgccctggaagccccgggagatgtcctcatacatggagcagtcgtccaggttcaggccttcataaangttttcatcttcaaattcatcccccggcattcaaacccgagcttctcgttctgncatcgtttt

SEQ ID NO: 2704 - DNA, 484 bp, homo sapiens
  misc_feature (240)..(240): n=unknown
  misc_feature (384)..(384): n=unknown
gcatgacagagaaggcacttccttcggccaaccctggaactgaattcggcctgaagttgatcctggacataggccaggaagactacgtccccttccttgcgtccacggccggggtcaggctgatgcttcacgagcagaggtcataccccttcatcagagatgagggcatctacgccatgtcggggacagagacgtccatcggggtactcgtggacaagcttcagcgcatgggggagcccnacagcccgtgcaccgtgaatggttctgaggtccccgtccaaaacttctacagtgactacaacacgacctactccatccaggcctgtcttcgctcctgcttccaagaccacatgatccgtaactgcaactgtggccatactgtanccactgccccgtgggggagaaatactgcaacaaccgggacttcccagactggggcccattgctactcagatctacagatgaacgttggcgcagaagagag

SEQ ID NO: 2705 - DNA, 397 bp, homo sapiens
cttttggcatgggtttatgctgagcctaccatgtatggggagatcctgtcccctaactatcctcaggcatatcccagtgaggtagagaaatcttgggacatagaagttcctgaagggtatgggattcacctctacttcacccatctggacattgagctgtcagagaactgtgcgtatgactcagtgcagataatctcaggagacactgaagaagggaggctctgtggacagaggagcagtaacaatccccactctccaattgtggaagagttccaagtcccatacaacaaactccaggtgatctttaagtcagacttttccaatgaagagcattttacggggtttgctgcatactatgttgccacagacataaatgaatgcacagattttgtagatg

SEQ ID NO: 2706 - DNA, 408 bp, homo sapiens
  misc_feature (351)..(398): n=unknown
tgatcaagtaaatggaattttgaacaggtaaagaggaaacaaagaattaaggtatccctgtggaatagtgcaagaaaggagtgccccacccatagtgttatctacaataggtactccggggaaaggaccccaaggagtcagaccacaaatgtatgaccagcacaattctatgatcaaactctacctctagcaaggcgtctcaacaatcaagttctatttaaatcattcgctcgtgtcttctttcagtcatgatgaaataatgagaatataataaggaacagaaggtaatgcattggtcaccacccttggagaagctggtgggatgtatctggattagtcctcacggggggngctatttcctgcatagtcttcattatccagtcaacatagttctttanccgtgtgtag

SEQ ID NO: 2707 - DNA, 475 bp, homo sapiens
  misc_feature (413)..(413): n=unknown
cagggatgtacaaaataattttaatgtattaactcatactgcctgtcttttataggggaaaaaaataaccttttttattttaaagttataaggtttttaccttttagttgcttggatgacagggaattagcctaccccattttggtctggaacagaagactttcaaatttaatatggtccaagtgtcttcctactcaaggtaaacattatctccaaaattacatttatgattctaatatttggcattgtgtctgtatctaatttaaacagatgttaatggacgtctggccgaaactattatacttttataagatgagctgaatcctcttactttaaaaactggtctttttatttaccctctgtggtagaagagtcaccagcaggttccaaattgatgtgtatgataggaaaanaaccttaattttaaatataatatagagccttaaactatgccactgggtggcagaggctgtat

SEQ ID NO: 2708 - DNA, 407 bp, homo sapiens
  misc_feature (267)..(397): n=unknown
gagacagaaggttttcatataaatgcaagtttgacaaagtcagcatctttctagctgtctaaggaagagtcacttgtaacacagccagccaggaggctgctttgttttttattataaagaacactaacacaaatgcagcatgattgctgtaaaataaatgtgaaatttgtacaaaagtcccagtccttccgcagttctaggtttacagtcaggctcaaccttacttgccccgctcctgcatgaaaacaagtgcgttttatacagccnnggccacccagnggcanagnttnaggcncnanataganttaaaantaaggnttttttccgagcagncacannaattngaacccncnggngacnnntngnccacagaggggnaataaaaagaccagttttnaagtaagagg

SEQ ID NO: 2709 - DNA, 398 bp, homo sapiens
  misc_feature (132)..(298): n=unknown
agaaatttaagttcgtgtggttttaccttttccgggagtctccagctggccctcatttgtgtccggagctcaggagttcccaaaccgactcagtcgcaccaagtttccgtcttttggaattggggaaggagnnnnnnnnnnnnnnnnnnnnnnnnnngagccagttttaatcgctttgaataaatactcccttaagtagttaaatataggaggagaaagaatacatcggttgttaaagcnggagaggaagagagacctgccctgtagcgtgactcctctnnnnnnnnnnnnnnnnnnngccggagtattttactaagcccctaaaatgtcgagatttgtacaagatcttagcaaagcaatgtctcaagatggtgcttctccagttcccaagaagtcca

SEQ ID NO: 2710 - DNA, 111 bp, homo sapiens
agtgatcatcattgaggcttcagtcaaaagctcttccaaagtagctcagtattaagattatacaatattgcactttaagatggactaacttttgggattctcttcaaagaa

SEQ ID NO: 2711 - DNA, 451 bp, homo sapiens
  misc_feature (21)..(21): n=unknown
  misc_feature (362)..(362): n=unknown
gaagctctgtggcctcttttngggtgggggcgggggtccaggcagaaagaaaccgtctgctgctcaagacccacaggacgccgggaagactaaatgatcactgcccccagtgaatatggtgaagaagctggtgatggcccagaagcggggagagacacgagccctttgcctgggtgtaaccatggtggtgtgtgccgtcatcacctactacatcctggtcacgactgtgctgcccctctaccagaaaagcgtgtggacccaggaatccaagtgccacctgattgagaccaacatcagggaccaggaggagctgaagggcaagaaggtgccccagtacccatgcctgtgggtcaacgtgtcanctgccggcaggtgggctgtgctgtaccacacggaggacatcgggaccagaaccagcagtgctcctacatcccagggcagcgtggacaat

SEQ ID NO: 2712 - DNA, 73 bp, homo sapiens
ggcactttatatcctagaaaatagtaatactgtaaatgtgttctagaaatgggagctgctgttgctcttatta

SEQ ID NO: 2713 - DNA, 434 bp, homo sapiens
ttgggttaactttatacccaaatagcagagaaagctctggttacttgagacttgcttttcatgtgtgcagtggggagaacgatgctatcctggagtggccggtagaaaacagacaggtgataattaccatccttgaccaggagcctgatgtccagaacaggatgtcctcaagcatggtgttcactacctcgaagtcgcacacatctccagcgataaatgacactgtcatctgggacaggccgtccagggtgggaacctatcatacagactgtaattgttttagaagcatcgacttgggctggagtggtttcatttcccaccaaatgctgaaaaggaggagtttcctgaaaaatgatgacctcatcatatttgtgggactttgaagatatcacccactcagcccagactgaagttcccactaaaggcaaaagact

SEQ ID NO: 2714 - DNA, 496 bp, homo sapiens
  misc_feature (468)..(480): n=unknown
gcgtgatcaacatgagcatccccattgtactgcccgtctctgcagaggataagacacggctggaagggtgcagcaagtttgtcctggcacatggtggacggagggtagctatcttacgagacgctgaattctatgaacacagaaaagaggaacgctgttcccgtgtttgggggacaacatgtacaaaacacccccatatcaaaatggtgatggaaagtggggactggctggttggtggagaccttcaggtgctggagaaaataagatggaatgatgggctggaccaataccgtctgacacctctggagctcaaacagaaatgtaaagaaatgaatgctgatgcggtgtttgcattccagttgcgcaatcctgtccacaatggccatgccctgttgatgcaggacatcgccgcagtcctagagaggggtacaacaaccggtctcctataaacctctggcggtggacaangatgacgatgtnctctagactggcggat

SEQ ID NO: 2715 - DNA, 460 bp, homo sapiens
  misc_feature (220)..(393): n=unknown
tttacaactgataaatgacattggaagagtacaggttgtcaagacatgctggaaaatatattcacttttcagcaagtaactagacacatggtcaaacaaagccttaagaaatctgggacctgcctgctcaggtgcagtagaaaatacatagagctaattttattatgaaatgtataagaatattgcttttacctgctaagatttggtcttcagtttgacnnnnnnnnnnnnnnnnnnnnnnnnnatatatatatttttttttaattatagacacaacttttacttcattataaaagattaaaatgcatcattgagaagcnatttaatacaaagcatctaatcataaaaatagaaaaggtanncaaagagncnttcagaaagaaactctggagncaaaggcttagttcttctccagggacctgtaataatctgtcaggaccttccatgctttgggggccat

SEQ ID NO: 2716 - DNA, 441 bp, homo sapiens
  misc_feature (422)..(422): n=unknown
gctttgcctaaggaaatggaaaattttgtccagagttcaggggaagatggtattgtggtgttttctctggggtcactgtttcaaaatgttacagaagaaaaggctaatatcattgcttcagcccttgcccagatcccacagaaggtgttatggaggtacaaaggaaaaaaaccatccacattaggagccaatactcggctgtatgattggataccccagaatgatcttcttggtcatcccaaaaccaaagcttttatcactcatggtggaatgaatgggatctatgaagctatttaccatggggtccctatggtgggagttcccatatttggtgatcagcttgataacatagctcacatgaaggccaaaggagcagctgtagaaataaacttcaaaactatgacaagcggagatttactganggctttgagaacagtcatt

SEQ ID NO: 2717 - DNA, 201 bp, homo sapiens
  misc_feature (10)..(184): n=unknown
aaatacttanatttatttttatatcatcattttaaaattgaaattaatttgtagatatacctantcaacatctgtaagantttcnaaattttcaaaaagccagataagccantttatttntttaannctattaatnagcatntcactannnttatatgacagtaaaaaaatgagaaggtaacanatttgcttactagtgta

SEQ ID NO: 2718 - DNA, 302 bp, homo sapiens
  misc_feature (62)..(96): n=unknown
gctcgaggccccctataaaacagcctacagtggacagtctggtcggcagagccgcaggtcantcgtgaagagggagctctattgccaccatgagtntctccggcaagtaccaactgcagagccaggaaaactttgaagccttcatgaaggcaatcggtctgccggaagagctcatccagaaggggaaggatatcaagggggtgtcggaaatcgtgcagaatgggaagcacttcaagttcaccatcaccgctgggtccaaagtgatccaaaacgaattcacggtgggggaggaatgtgagctg

SEQ ID NO: 2719 - DNA, 341 bp, homo sapiens
aaataatatgaaatgcagacttgtttaaattctcttgctgattctcttgaagacaatgtcacccaatgtcatggtattggtgattatgtcgccgttgagttcggtcacagacttgatgtttttgaaagctgtcaccagtttattgtcaccttccaactgaaccactgtcttgactttctcccctgtcattgtctccagctcacattcctcccccaccgtgaattcgttttggatcactttggacccagcggtgatggtgaacttgaagtgcttcccattctgcacgatttccgacacccccttgatatccttccccttctgggatgagctctttcggcaga

SEQ ID NO: 2720 - DNA, 515 bp, homo sapiens
  misc_feature (6)..(6): n=unknown
  misc_feature (25)..(499): n=unknown
accgangctgcaccggcagaggctgcggggcggacgcgcgggccggcgcagcatgggtgaagattagcttccagcccgccgtggctggcatcaagggcgacaaggctgacaaggcgtcggcgtcggcccctgcaacggcctcggccaccgagatcctgctgacgccggctagggaggagcagcccccacaacatcgatccaaganggggagctcagtgggcgggcgtgtgctanctgtcgatgggcatggtcgtgctgctcatgggcctcgtgttcgcctctgtctacatctacagatacttctttcttgcacagctggcccganataacttcttccgctgtggtgtgctgtatgaggactccctgtcntcccaggtccggactcagatggagctggaagaggatgtgaaaatctancctcgagcgagaagtacgngcgcatcaaacgtggcctgtgcccagtttgggnngcggtgaacctgnagacatcatncatgantttcagcgggggtctg

SEQ ID NO: 2721 - DNA, 491 bp, homo sapiens
  misc_feature (208)..(401): n=unknown
aaagagatctaattgagaaaatatacaaagcatttaagagtttcatccccagagactgactgaaggcgttacagccctcctctccaaggctcagggctgagaacggttagcatatcgaatgatcagtaaaaacatgcaaaagtgagaaggaaagggaaaaaggtgcattcccctaagctgagggggatggaatttcagaacagaggangcagggtggncaagtnccaggtggctctccctttccctctgtgttatctttcaaaacagttccaagcttggagaaagcaatgagctccacctactcagcagancccacggntcgtnccccgtggacgtgactgagcagtgaccttgcctgccccgttcctcagccgcccatcccactgcttgactgaggggancctgcttgtgctcctggggggcaggactgggggtcctagctccttgcttctttgggtccactcagagaacagttgtgcttgacggactca

SEQ ID NO: 2722 - DNA, 503 bp, homo sapiens
gtcaccatcacttgccgggccagtcagggcattagcagttatttagcctggtatcagcaaaaaccagggaaagcccctaagctcctgatctatgctgcatccactttgcaaagtggggtcccatcaaggttcagcggcagtggatctgggacagaattcactctcacaatcagcagcctgcagcctgaagattttgcaacttattactgtcaacatcttcatagttacccgctcactttcggcggagggaccaaggtggagatcaaacgaactgtggctgcaccatctgtcttcatcttcccgccatctgatgagcagttgaaatctggaactgcctctgttgtgtgcctgctgaataacttctatcccagagaggccaaagtacagtggaaggtggataacgccctccaatcgggtaactcccaggagagtgtcacagagcaggacagcaaggacagcacctacagccttcagcagcaccctgacgctgagcaaagcagact

SEQ ID NO: 2723 - DNA, 438 bp, homo sapiens
  misc_feature (16)..(19): n=unknown
  misc_feature (409)..(409): n=unknown
cataattaaagccaannnngaggaggggggtgaggtgaaagatgagctggaggaccgcaataggggtaggtcccctgtggaaaaagggtcagaggccaaaggatgggagggggtcaggctggaactgaggagcaggtgggggcacttctccctctaacactctcccctgttgaagctctttgtgacgggcgagctcaggccctgatgggtgacttcgcaggcgtagactttgtgtttctcgtagtctgctttgctcagcgtcagggtgctgctgaggctgtaggtgctgtccttgctgtcctgctctgtgacactctcctgggagttacccgattggagggcgttatccaccttccactgtactttggcctctctgggatagaagttattcagcaggcacacaacagangcagttccagattcaactgctcatcagat

SEQ ID NO: 2724 - DNA, 140 bp, homo sapiens
  misc_feature (37)..(138): n=unknown
gccccgcccactgcaaccctgtgcccgtcatgcccancaggntcctgctccagcccagcccccagagagcagaccccaggtgctggccccgngggttttggtctnngcctcagtcactgtgttatgtcttcggaactngg

SEQ ID NO: 2725 - DNA, 535 bp, homo sapiens
gtgcagggagaagggctggatgacttgggatggggagagagacccctcccctgggatcctgcagctccaggctcccgtgggtggggttagagttgggaacctatgaacattctgtaggggccactgtcttctccacggtgctcccttcatgcgtgacctggcagctgtagcttctgtgggacttccactgctcgggcgtcaggctcaggtagctgctggccgcgtacttgttgttgctctgtttggagggtttggtggtctccactcccgccttgacggggctgccatctgccttccaggccactgtcacagctcccgggtagaagtcactgatcagacacactagtgtggccttgttggcttggagctcctcagaggagggcgggaacagagtgacagtggggttggccttgggctgacctaggacggtgaccttggtcccagttccgaagacataacacagtgactgaggctcagaccaaaacccccggggccagcacctggggtctgctctctgggggctgggctgagcagg

SEQ ID NO: 2726 - DNA, 413 bp, homo sapiens
  misc_feature (317)..(317): n=unknown
gtgctcacagtcatcaattatagaccccacaacatgcgccctgaagacagaatgttccatatcagagctgtgatcttgagagccctctccttggctttcctgctgagtctccgaggagctggggccatcaaggcggaccatgtgtcaacttatgccgcgtttgtacagacgcatagaccaacaggggagtttatgtttgaatttgatgaagatgagatgttctatgtggatctggacaagaaggagaaccgtctgcatctggaggagtttggcaagctttttcctttgaggctcagggcgggctggctaacattgcnatattgaacaacaacttgaataccttgatccagcgttccaaaccacactcaggccaccaatgatcccccctgaggtgaaccgtgtttcccaaggag

SEQ ID NO: 2727 - DNA, 515 bp, homo sapiens
  misc_feature (249)..(249): n=unknown
cgggaaggtgacagtgaggggttcttcaaaggagaacagaggataaaaggctcaatgaaaggataatctccatattagtgctaccaaagtgtcattaatttctatttgttggaaactttactaaggaatgactgctttgaggtaatggataaggacagagcttgaagggtcagcaattcagtcagccactggagtagttttcacatgaagtgagaagaaaagctgagatggagtttgtagggcagctgnactgcgcatctctcctaagtcctcttctgttcagatattttgtcacctttacagtatttcacagggtcccctgggcccgggggtcatggccagaacgcagagactttatgatgaggacggtgcccacgatgatgccgactaggcccagcaccaggcccagggcacagagcacagtctccgttgtctcaggcatctggattggctcttgggcctcccagtgcttgaggagcggctggtccaagccccagtgctccaccctgcagtca

SEQ ID NO: 2728 - DNA, 296 bp, homo sapiens
  misc_feature (293)..(293): n=unknown
cggtttcaggctttcttgcagatatgaagtattcttggaatgcaataagtatgtattgaactgtactgtaaagtagctccaaaacttaattactctcctgttttaggggttatacatttggactgtgcattctccaagagatgaagcggtgaagttgggatttacattggaagtgctgtagacttctttatgtggctcagtggagagagggaaagaatgttgcacctgctctagtaccataggtcaagaggcttctggatcacaaagtcataactagacaggtttgttcttgnagt

SEQ ID NO: 2729 - DNA, 502 bp, homo sapiens
gtgaggaaggatgggccttgctgaagtgtggaggaaagaattatgaacgggccaaggcctgctttgaaaaggtgcttgaagtggaccctgaaaaccctgaatccagcgctgggtatgcgatctctgcctatcgcctggatggctttaaattagccacaaaaaatcacaagccattttctttgcttcccctaaggcaggctgtccgcttaaatccagacaatggatatattaaggttctccttgccctgaagcttcaggatgaaggacaggaagctgaaggagaaaagtacattgaagaagctctagccaacatgtcctcacagacctatgtctttcgatatgcagccaagttttaccgaagaaaaggctctgtggataaagctcttgagttattaaaaaaggccttgcaggaaacacccacttctgtcttactgcatcaccagataggggctttgctacaaggcacaaatgattcaaatcaagggaggctacaaaaggggca

SEQ ID NO: 2730 - DNA, 510 bp, homo sapiens
cattttttctctactacatagcactcatacaaatgatttctctttcttacatgcatacacacattctgtttcactaattgttgaacacaactaatattttgtcagatttattattcaagaattacatcattacagtgaattataatgtttctgaaaacagtaagcagaaaagatgattagtaaatgttagcataaaatgaaatgaaatgtgaaagtggctgatatctgggtgcctaaggaccttgtctcacagagttctcaaagtcagcagccagtctcagggcccgctcatagtactccagggcttcattcatatttccttccaatttgtagacgaacccaaggaggctcaagctttccagatctaatgcctttctccgaagtttccttaaaaccaatttcttcaaagaattgatacttttatcccttgttaatgatgcctgttctatttttatagcttttaaataatgggataattgcattgacgtcagatttcttttggaattcctg

SEQ ID NO: 2731 - DNA, 323 bp, homo sapiens
  misc_feature (72)..(102): n=unknown
  misc_feature (288)..(288): n=unknown
ctatctaatggggaaatgtagctatgggccataaccaaaactcacatgaaacggaggcagatggagaccaanggtgggatncanaatggannccnnnctgcnattgtatttaaaagggtaatgtggccttggcatttcttcttagaaacatggggttgtttcctgaaatgaggcaaggactttggacaagaacatgtttggacttgagatggtttttgtaaacccaaatgatattagttctagtctgtctttatcgctcactgtattttgttttcattcatactacanggataatagacttgattgtgttccatcatttatgt

SEQ ID NO: 2732 - DNA, 51 bp, homo sapiens
  misc_feature (24)..(50): n=unknown
aatatttgcctttttaagtaaaanaaaaaaaaaagggcggccgctcnannt

SEQ ID NO: 2733 - DNA, 568 bp, homo sapiens
gaacaatcaaagatggaagacactctagagcatacagataaagaggtgtcagtggaaactgtatccattctgtcaaagactgaggggactcaagaggctgaccagtatgctgatgagaaaaccaaagacgtaccatttttcgaaggacttgaggggtctatagacacaggcataacagtcagtcgggaaaaggtcactgaagttgcccttaaaggtgaagggacagaagaagctgaatgtaaaaaggatgatgctcttgaactgcagagtcacgctaagtctcctccatcccccgtggagagagagatggtagttcaagtcgaaagggagaaaacagaagcagagccaacccatgtgaatgaagagaagcttgagcacgaaacagctgttaccgtatctgaagaggtcagtaagcagctcctccagacagtgaatgtgcccatcatagatgggggcaaaggaagtcagcagtttggaaggaagccctcctccctgcctaggtcaagaaggaggcagtatgcacccaaattcaagttcagagctctgagggctcattcactctaacagc

SEQ ID NO: 2734 - DNA, 438 bp, homo sapiens
  misc_feature (280)..(351): n=unknown
cacaacttatccaaatgaatgtgttgcaacattgttcttaaaagaatggcacaaatatggcacaaacacaatccagtatctatcaaaataccatttgtaaagaacctgacttatttcatgccatgtgtgaatgcagtccagcatataagagtagaatcaaaaacttacaacaattcttttcttcataacatataaaacatattcactactttgcctcaggattaagcacacttatcggtccaaacaaccataacaagtaggaaaaaggatgtaaagttantttgctaccagantataacttctttctaacctccactgggttagaaagaaaaatttcccaatgacaatagnacattctgtatgtttcaaaatgctttttagttttagcacactccgtgtaataggaaagtgaccaatttcagagtaccactaaatatg

SEQ ID NO: 2735 - DNA, 435 bp, homo sapiens
  misc_feature (214)..(214): n=unknown
  misc_feature (401)..(401): n=unknown
tatgacctgacctggtgtgcagtacctgggagctcatttgtagctctcatccaaagaaatttagtaaaggcgtgaaagggtcttagttatgaccattaaacctataatacctatcccagactgtatttgagtaggatcgtgatacagaaaatattatagtgacattgtatttgtcctttttcttagatgtggccgtcttgtatatcatcttggnttgcctttttccttcctaactttcccatatgtagaagaagccattaagattgcttactgtgaaaagaaatgtggaaactgctctctcacgactctcaaagatgaagacttttgtaaacgtgtatctttgggctactgtggataaaacagttgaaactccatcgcctcattaccatcatgagcatcancacaatcatgggcatcagcaccttggcagcagtg

SEQ ID NO: 2736 - DNA, 375 bp, homo sapiens
ccaattctgtactgcattcttgcttaatagtattaaccataaaggaggtcaggtttatagggtttggtttacctattaaaccatcattgactatggaaatacttactaagcaatatagagacagacaatattatctttccccttatatcttttaagacagccactcaagttttagaagagtatgatacaacattagagaaagaaagatacaaaggctttattcatgtgtgatagtaaaaatcaggatgagtcttagatatacaaaagataaatggatatttaaaatagttatatatgcttttttagcaaaatattcacgtgttaagtatttctggatcttaaaatacaaaatccacttattttattagttaaaag

SEQ ID NO: 2737 - DNA, 500 bp, homo sapiens
  misc_feature (463)..(463): n=unknown
agcggaggccccggctgctggcattcgcttcaggccttgggccacccgggagctgtacatcccttcaggcgagagcgaggttgctggtggggcctctcacagctcgggacagcgcactccccagggcccagtgtcggccactgtggaggtcagcagccccacaggctttgcccagtcacaggtgctggaggatgtgagccaggctgcaaggcacataaaactcggcccctctgaagtctggaggactgagcgaatgtcatatgaaggacccactgcagaagtggtggagatggatgtgagtaacgtagaggcgatccgcagccggacacaggaagcgggagctctcggtgtgtctgaccgtggttcctggagagacgcggacagtaggaatgaccaggcagttggtgtgagctttaaggcctctgctggggaaggagaccaggcccacagagaacagggcaangagcaggccatgtttgataagaaggtgcagtccagag

SEQ ID NO: 2738 - DNA, 384 bp, homo sapiens
  misc_feature (380)..(380): n=unknown
atgtgaaatatcacaacagactacagctgtcctcgccataaatactatattgtttaaagttctgtacatagaaagcaattcattcaagtcttaagatgaatttagctctatatggcaagtaattttttcctaaagatgaaatcatttagcaagaatttttttaacataaacagtctgcctatttcccatttctttttgaaaagactttttagagtctaaattgtatttatttttcccctaaaatgttagtctgttatttcatattagcacatgcaagcaaaatttactcttaaatatattactttaatctggttaatgttttgacatctataattaattgtagtttcaaacagatgcaagccatgtctgtgaccaggtgnaaaa

SEQ ID NO: 2739 - DNA, 470 bp, homo sapiens
  misc_feature (398)..(442): n=unknown
tgtctccgggacagacagccaggatcacctgctcaggagatatagtggcagaaaaatatgttcggtggttccagcagaagccaggccaggcccctatattggtaatttataaagacattgagcggccctcaggtatccctgagcgattctccggctccagcgcagggacgacagtcaccttgaccatcagcggggcccaggttgaggatgaggctgactatttctgttactgtgcggctgacgacaaaagagtgttcggcggggggaccaggttgaccgtcctaggtcagcccaaggctgccccctcggtcactctgttcccggcctcctctgaggagcttcaagccaacaaggccacactggtgtgtctcataagtgacttctacccgggagccgtnacagtggctggaaggcagatagcagccccgtcaaggcgggagtngagaccaccacacccctccaaacaaagc

SEQ ID NO: 2740 - DNA, 558 bp, homo sapiens
  misc_feature (515)..(553): n=unknown
agggcttgatgccttggggtgggaggagagacccctcccctgggatcctgcagctctagtctcccgtggtggggggtgagggttgagaacctatgaacattctgtaggggccactgtcttctccacggtgctcccttcatgcgtgacctggcagctgtagcttttgtgggacttccactgctcaggcgtcaggctcaggtagctgctggccgcgtacttgttgttgctttgtttggagggtgtggtggtctccactcccgccttgacggggctgctatctgccttccaggccactgtcacggctcccgggtagaagtcacttatgagacacaccagtgtggccttgttggcttgaagctcctcagaggagggcgggaacagagtgaccgagggggcagccttgggctgacctaggacggtcaacctggtccccccgccgaacactcttttgtcgtcagccgcacagtaacagaaatagtcagcctcatcctcaacctgggcccgtgatggtcaangtgactgtcgtcctgcgctggaaccggagaatcctcangggat

SEQ ID NO: 2741 - DNA, 388 bp, homo sapiens
ctgcaaatatgtgccaaattctggccaagaagatgcagacagagatggcattggcgacgcttgtgacgaggatgctgacggagatgggatcctgaatgagcaggataactgtgtcctgattcataatgtggaccaaaggaacagcgataaagatatctttggggatgcctgtgataactgcctgagtgtcttaaataacgaccagaaagacaccgatggggatggaagaggagatgcctgtgatgatgacatggatggagatggaataaaaaacattctggacaactgcccaaaatttcccaatcgtgaccaacgggacaaggatggtgatggtgtgggggatgctgtgacagttgtcctgatgtcagcaaacctaaccagtctgatg

SEQ ID NO: 2742 - DNA, 591 bp, homo sapiens
aaacgttttgatatatttgggttggtaaaagctaaagaaaattgaagttaaaatatatatggttttagtgttccgaaaagcagttacagattgcttccttggtttaattatcgaagcggtcgaaattctgggtttgaaactcttggaagtcctcagggatggtgtcattgcagcgatacttgaggttggaccagatgatgttttcttgagagaagcagaaaacgccaagtcggcctccacgcattgtggtgtctatggtgacgccagagtcagccaccaactcagagccttcataaaatcgtaccctgatgtagcccacctggggcctgtgctgtaggaaccagcggtaggacaccttgtccttccagcccacattcctggagtccttccacagcagcctgacctggtcactggtgtcccccgtgtgccacagggagttccggagatgctcccctggacctgtcttagacttcacagccttgagctgaatgccaggttctgcaactgtcggaatggggtggcttgccaatatgtctgctccgtctgcttccacatgaccacgtagaagctggagcatttggtagccaaaga

SEQ ID NO: 2743 - DNA, 214 bp, homo sapiens
  misc_feature (174)..(174): n=unknown
gcgggcctgtccaggggctccccgccccaccccacgccttagctgcaggcccttttgggcaaaggggcccatcctagacctgggccatccattccattttgttccacatttcctttctactctttctgccaagagcctgcccctgcatttgtcctgggaaacacggtatttaanagagaactatattggtattaaagctggtttgttttaaaaa

SEQ ID NO: 2744 - DNA, 169 bp, homo sapiens
  misc_feature (152)..(152): n=unknown
aataccgtgtttcccaggacaaatgcaggggcaggctcttggcagaaagagtagaaaggaaatgtggaacaaaatggaatggatggcccaggtctaggatgggcccctttgcccaaaagggcctgcagctaaggcgtggggtggggcggggngcccctggacaggcccg

SEQ ID NO: 2745 - DNA, 315 bp, homo sapiens
ttatttgatctaattgtttatagattcttgtgaacttttaccttgacaattatgttattttcaaagataatcatcttttcctattgaatccttgctcttctgactgcctgttcctatctcatggtattggccaaaccctgtgatgccgtgttgaataggagtactttctcaccacacttgtcttccttccgcctctatgggaatccttccaaaacggcaccattaagtgttatactcgctgtagctcctccttatgaagttctcttctcattgtagtctgttaagtgtttatgattaaagagtgttatattttgt

SEQ ID NO: 2746 - DNA, 255 bp, homo sapiens
  misc_feature (153)..(255): n=unknown
aagagaacttcataaggaggagctacagcgagtataacacttaatggtgccgttttggaaggattcccatagaggcggaaggaagacaagtgtggtgagaaagtactcctattcaacacggcatcacagggtttggccaataccatgagatangancnggcagtcagtananctannnttcaacangcgaanaggtnnncccctnaatatcantnatnnntnatnntttctcccncntcggcnnaantcnncatn

SEQ ID NO: 2747 - DNA, 129 bp, homo sapiens
cttcttggtcatcccaaaaccaaagcttttataactcatggtggaaccaatggcatctatgaggcgatctaccatgggatccctatggtgggcattcccttgtttgcggatcaacatgataacattgct

SEQ ID NO: 2748 - DNA, 453 bp, homo sapiens
  misc_feature (110)..(110): n=unknown
  misc_feature (243)..(338): n=unknown
  misc_feature (447)..(447): n=unknown
aaaatcattgacatagaataattccaactaaagtacatattaaattcctggaaaataaattttgacttaacagggtaagttgtgaaaagacgttttgtcgcaggaaaaangaaatcctccatttaaaaccctccatgctggaataaaggaggagtcccatcttttggtcattccacttcaggcttttgatataactaatcccttttcttcttctttcctgttttggcaagctttcggaaacanaacaggcaacattttgtgatcataaatatcatagttgccacgcaggccagcaggantgctatcacatccaaagagtggtactggatccaggtgangttgtgggctgcgacccgaagtgcttggctcctttatggccgcatgacaaactcaatccagaagactgctcgatcccaggggcttcaccggttgatcctgatgaattcntgataa

SEQ ID NO: 2749 - DNA, 537 bp, homo sapiens
agttcttgtggcccccgcggtgcggagtatggggcgtgatggccatggagggctactggcgcttcctggcgctgctggggtcggcactgctcgtcggcttcctgtcggtgatcttcgccctcgtctgggtcctccactaccgagaggggcttggctgggatgggagcgcactagagtttaactggcacccagtgctcatggtcaccggcttcgtcttcatccagggcatcgccatcatcgtctacagactgccgtggacctggaaatgcagcaagctcctgatgaaatccatccatgcagggttaaatgcagttgctgccattcttgcaattatctctgtggtggccgtgtttgagaaccacaatgttaacaatattagccaatatgtacagtctgcacagctgggttggactgatagctgtcatatgctatttgttacagcttctttcaggtttttcagtctttctgcttccatggggcttccgctttctcctccgagcatttctcaatgcccatacatgtttattctggaattgt

SEQ ID NO: 2750 - DNA, 578 bp, homo sapiens
  misc_feature (231)..(231): n=unknown
  misc_feature (345)..(391): n=unknown
  misc_feature (542)..(542): n=unknown
ggtcagttcataggcctcaatcaatacaaattatttcaagaaaccatcctttgtgattaaagtaaatattgatactacatagcccaattatcatatggctaataggagaagcaaaactgtagagctagttttgaaacgtgacgttatatggctctatctctacaacattttacatggtagatctctgcccagcctcatccagagtaagtttcttttccttgctgctacttnattgtttaactctgaatctgatttgtccatgttgttgccagagtagggctggcatggaacctcttgctccctgttcagtgcctccatttggatgaagaatggtagaatttggcnccttaggacgtttccaatgcggnctngtgactatcccaaaaatgangggccccgaacacccaggatcagaaggccaagcggtattttacgaaaacaccttctggcgggatgtactgtatgcaggatctctcagggaaaaaatcagtttctctggtcaaatcccataagtgctgttgcaatcactgttccaaagatgncaatttccagaataaacatgtatgggctgagaaatg

SEQ ID NO: 2751 - DNA, 416 bp, homo sapiens
  misc_feature (355)..(356): n=unknown
gcgtacactggcagtaattagtttcaggatttggctaacacaaatgccctacagtccagtgtctgattggcatgtggagagagaaacgctccagaggacaagtgctgtttgataaagtgtgtgaacacttgaacttgctagagaaagactactttgggcttacgtatcgagatgctgaaaaccagaagaattggttggaccctgctaaggaaataaaaaaacaggttcgaagtggtgcttggcacttttcatttaatgtgaaattttatccaccagaccctgcccaactatctgaagatatcaccaggactcagaaggggtagaaattatgttaggagtttgtgcaagtggtctnntgatatatcgcgaccggctgcgaataaacagatttgcctggcccaaggttctaaagattt

SEQ ID NO: 2752 - DNA, 343 bp, homo sapiens
  misc_feature (230)..(230): n=unknown
ttcaccatgggctgtgatgcaggtgatcgtgtaatggagaatctctctttttgaaggctatttataactaacactaaatagttttaattacagtggaaattctgtacagtttaaggcttggctctgaactagaatgtaaatatggaccagatttgaaaataaaacactttcttttcaagtaaaagaagaaaaatcaattaaaaaatacacggcacggaaaaagttctagngaaaacaaagccacaggaagcccagcagtttctcctgaagtgaaatttcataatattgtaaactaacaaaaatacaggttttcttcccaaaataatgacaatttaagctctct

SEQ ID NO: 2753 - DNA, 389 bp, homo sapiens
aagattctactggacaggatatattgttcgttttccctaaagataagctggtggaagaaggcaccaatgttaccatttgttacgtttctaggaacattcaaaataatgtatcctgttatttggaagggaaacagattcatggagaacaacttgatccacatgtaactgcattcaacttgaatagtgtgcctttcattaggaataaagggacaaatatctattgtgaggcaagtcaaggaaatgtcagtgaaggcatgaaaggcatcgttctttttgtctcaagtaagtgtgcaaattctctgtgggcctttcttctcatttcctgaggaatagattaaatctcctttactagaagacaaataaacatttctacccatgatctgaatttt

SEQ ID NO: 2754 - DNA, 548 bp, homo sapiens
  misc_feature (247)..(247): n=unknown
  misc_feature (379)..(546): n=unknown
gacattagtaaaaattttacatagcctgtattgaattcacacattcaaatgaggctttaccagtaatgatggggattaatacagagctagtgtttggcatttgactttatctcaaatgagctaactgctcaatgaattacagaagactcatactctttttattttttcctggaaattaaaaaagaaaagctttactaaatattgacatatatatttactccaaattttacatttagtgaaataagantatctctagtagctcagttaacatcaacagaaagcttcaaaagatgattctgaaaatggcaggcaaaatttctttttattgtaggcaattacttaaactggaaatttggctttatgcataataagtcatgtnggtaaaacatccacattgcagttaggtttccagtatctagcttttatttattttttagcaatgacattaacaagatttttgccagggttatnanaatgagggctttcttgagaattacttatagtttccgagttgaatggcagancgcacgtagacacatcctganngt

SEQ ID NO: 2755 - DNA, 498 bp, homo sapiens
  misc_feature (449)..(449): n=unknown
tccatgcagttgggtgcagagtctgagctcttaatcaccttgaccattacattaccttgctttttatttcctttggggaaatgtttcctaaaaaatgtaacgcccctctgtgctgctatgtgggaatcagaagtctcagtgcctgatcagacctccttgtccaggaacagacccttggggctgacccctccttgggacccaatgcccttctttctgcactatccaggtaccggggagaccaggatgccactatgtctatattggacatatccatgatgactggctttgctccagacacagatgacctgaagcagctggccaatggtgttgacagatacatctccaagtatgagctggacaaagccttctccgataggaacaccctcatcatctacctggacaaggtctcacactctgaggatgactgtctagctttcaaagttcaccantactttaatgtagagcttatccagcctggagcagtcaaggtctacgcct

SEQ ID NO: 2756 - DNA, 528 bp, homo sapiens
tcagttggggcacccaaagacaaccatgctctcggtgaaggcgccgaggtcctggcattgtttctggttctcttcgtcttggcattcgtcctcctcgggccagtgctccacccaagtgtccttcccgatgatgtagctgaggttgggcttctctccccagaaatcggaggagagaccccacatgaggtagtgtttcttctcctccagcttcagggcttctctgcacttgatggggctgatgaacgtgcgctgctgtccaacctgcacctcatccgagcctgacttgatggtctgctcaatggccatgatgtactcgtcaaagtcattggacagctgaaccttgaccagtcgggtcttgtacacatagtccactcctggctcacaggccttgtccagccgttcttccagggtgaccttgtcatccgacttttgtatgaagcaattctcctcagcacagcggcacagttcatcacggcagagcttgttcagctttccatcctcctttttcggatggtagaaccgggtaca

SEQ ID NO: 2757 - DNA, 416 bp, homo sapiens
cacccactgaactccgcagctagcatccaaatcagcccttgagatttgaggccttggagactcaggagttttgagagcaaaatgacaacacccagaaattcagtaaatgggactttcccggcagagccaatgaaaggccctattgctatgcaatctggtccaaaaccactcttcaggaggatgtcttcactggtgggccccacgcaaagcttcttcatgagggaatctaagactttgggggctgtccagattatgaatgggctcttccacattgccctggggggtcttctgatgatcccagcagggatctatgcacccatctgtgtgactgtgtggtaccctctctggggaggcattatgtatattatttccggatcactcctggcagcaacggagaaaaactccaggaagtgttt

SEQ ID NO: 2758 - DNA, 559 bp, homo sapiens
  misc_feature (557)..(557): n=unknown
ttttgagaactttacatagacagaaatcttctatctcctttttttctaattttggggaatgtcttccactagtggtcgctaaaaatgtagaaatatcatagggagtgcaaattacattgtctctttacctgccacaatctggcagcactcatcatgtagcaaatgcccaaataatagactacagattatagtgacttcaccctaggttaacattatttctaggtaaggtactagtatatctgaattgaaaagtggggcagctgttgactcagattcggcattttaattacattgtttccaagtatgatattctgagagtgtctatagcacttagtgtctgcttcatataaactaccagttattatatatttatgatgcaagtagttttccaaatgtggtgaaagtctgagtctttttatccccatgggtaaaatctgaatctggctctctgtgtctctcagtgcttgtttattgctggtcagagagtaaattcttgataaaagctgttgacttgggctctcacagtttatgcagacattggagagccatttgggtantt

SEQ ID NO: 2759 - DNA, 515 bp, homo sapiens
  misc_feature (240)..(242): n=unknown
  misc_feature (452)..(467): n=unknown
cacaattgctctacaactcagaacagcaactgctaaggctgccttgggaagaggatgatcctaaacaaagctctgatgctggggacccttgccctgaccaccgtgatgagcccctgtggaggtgaagacattgtggctgaccacgtcgcctcttatggtgtaaacttgtaccagtcttacggtccctctggccagtacacccatgaatttgatggagatgagcagttctacgtggacctnnngaggaaggagactgtctggtgtttgcctgttctcagacaatttagatttgacccgcaatttgcactgacaaacatcgctgtcctaaaacataacttgaacagtctgattaaacgctccaactctaccgctgctaccaatgaggttcctgaggtcacagtgttttccaagtctcccgtgacactgggtcagcccaacatcctcatctgtcntgtgggacaacatcntttcctcctgtggtcaaacatcaacattggctgagcaatggggcactc

SEQ ID NO: 2760 - DNA, 473 bp, homo sapiens
  misc_feature (18)..(300): n=unknown
  misc_feature (409)..(426): n=unknown
tgctataacatttctganccaaaggcagagggtatccattaacttcattgttgccttaattnangggtgggtggcaatgccaagggtgggaacacaangaanaaaganatattaacgtcagctaagaaatcaacatgttatcaggctatactgtagttggttgcttctgtgttactggacatgacaaatgatctggtaaatnatgttaaattggcttgaaacaaganagtctcccaattgttagccacggtttcagtcagccctggatgaaagatggaaaaatttgacatatatctcatnaagggaatttgttgcttccatggagattatagatggaggttactgaggaattaggtagctgggtggcttactccaggcatcccttagtaggtaacacttgagaaaaganaaaaatcaggaagtcanggaaataattcaaaggcatttgtgagcctgagcagatatagcaattt

SEQ ID NO: 2761 - DNA, 324 bp, homo sapiens
  misc_feature (4)..(273): n=unknown
ctanagaggcaggggttaccaactggccagcaggctgtgtccctgaagtcagatcaacgggagagaaggaagtggctaaaacattgcacagnngaagtcggcctnantggtgcggcgctcgggacccaccagcaatgctgctcttcgtgctcanctgcctgctggcggtcttcccagccatctccacgaagagtcccatatttggtcccnaggaggtgaataatgtggaaggtaactcagtgtccatcacgtgctactacccacccacctctntcaaccggcacacccggaagtactggtgccggcagggagctagaggtggct

SEQ ID NO: 2762 - DNA, 362 bp, homo sapiens
  misc_feature (284)..(327): n=unknown
ttctgatttgttagcaaatgccagcttgtaggctggttgaagtacagaactcagaggaaaaaagaaattaaattttagctttctggagagcagcccctctctggcaccatcaaacacttctttgtttcccttcaacttggaactcttcaaacatcaggggttgtgagggtttggccattcttttatcttgggtccatgtgagtgacagaaatggtgcggcctgggaaagatctccctcctttacattttctcttctccctcctcctccttattctaaaactgtncctccaacagangggcaggttttcttgtagagagatccctggnccaggacaggagatgccaaatctaatttatctcac

SEQ ID NO: 2763 - DNA, 555 bp, homo sapiens
  misc_feature (546)..(546): n=unknown
aggcagcggacgcatcacttgcacttctagaaatagatgcaacgatcaggacacaaggacatcctatagaattggagacacctggagcaagaaggataatcgaggaaacctgctccagtgcatctgcacaggcaacggccgaggagagtggaagtgtgagaggcacacctctgtgcagaccacatcgagcggatctggccccttcaccgatgttcgtgcagctgtttaccaaccgcagcctcacccccagcctcctccctatggccactgtgtcacagacagtggtgtggtctactctgtggggatgcagtggctgaagacacaaggaaataagcaaatgctttgcacgtgcctgggcaacggagtcagctgccaagagacagctgtaacccagacttacggtggcaactcaaatggagagcatgtgtcttaccattcacctacaatggcaggacgttctactcctgcacacagaagggcgacaggacggacatctttgtgcagacaacttcgaatttgagaggacagaatactcttctgacagancacactgtt

SEQ ID NO: 2764 - DNA, 453 bp, homo sapiens
agggcagaaacgacactcacgcagtctccagtattcatgtcagcgactccaggagacacagtcaccatctcctgcaaagccagccaagacattgatgatgatttgaattgggtaccaacagaaaccaggagaggctgctcttttcattattcaagattctactactctcgttcctggaattcacctcgattcagtggcagcgggtatggaacagattttaccctcacaattaataacatagaatctgacgatgctgcatattacttctgtctacaacatgataatttccctctgacgttcggccaagggaccaaggtggaaatcaaacgaactgtggctgcaccatctgtcttcatcttccgccatctgatgagcagttgaaatctggaactgctctgttgtgtgctgctgaataacttctatccagagaggcaaagtacagtggaaggtgga

SEQ ID NO: 2765 - DNA, 430 bp, homo sapiens
  misc_feature (359)..(384): n=unknown
aaagatgagctggaggaccgcaataggggtaggtcccctgtggaaaaagggtcagaggccaaaggatgggagggggtcaggctggaactgaggagcaggtgggggcacttctccctctaacactctcccctgttgaagctctttgtgacgggcgagctcaggccctgatgggtgacttcgcaggcgtagactttgtgtttctcgtagtctgctttgctcagcgtcagggtgctgctgaggctgtaggtgctgtccttgctgtcctgctctgtgacactctcctgggagttacccgattggagggcgttatccaccttccactgtactttggcctctctgggatagaagttattcagcangcacacaacagaggcagttccaganttcaactgctcatcagatggcgggaagatgaaagacagatggtgca

SEQ ID NO: 2766 - DNA, 68 bp, homo sapiens
  misc_feature (35)..(60): n=unknown
tgccactctgtcccgactggaatagagcgcaagantnantctctgatggatganattnanttcctcaa

SEQ ID NO: 2767 - DNA, 211 bp, homo sapiens
  misc_feature (119)..(207): n=unknown
ggctcacccacttctcatcgtggctggagtagatttgtcctgaggggggatcattggcttcttatcgggacatgaaaagggaagcacataggtcacatcaagtgtcagggcagggagangcccagcgactgctggccgggtagggcttggccataagccaggaaaaggatgccnggtaccaccttttagacacatgcagaaggagangaga

SEQ ID NO: 2768 - DNA, 531 bp, homo sapiens
  misc_feature (405)..(494): n=unknown
gaactctccatccggactagttattgagcatctgcctctcatatcaccagtggccatctgaggtgtttccctggctctgaaggggtaggcacgatggccaggtgcttcagcctggtgttgcttctcacttccatctggaccacgaggctcctggtccaaggctctttgcgtgcagaagatacttggactaactcgtgcattccagaaattatcaccaccaaagatcccatattcaacactcaaactgcaacacaaacaacagaatttattgtcagtgacagtacctactcggtggcatccccttactctacaatacctgcccctactactactcctcctgctccagcttccacttctattccacggagaaaaaaattgatttgtgtcacagaagtttttatgganactagcaccatgtctacagaaactgaaccatttgttgaaaataaagcagcattcaagaatgaantgtgggttggaggtgtccccacggntctgctagtgcttgctctcctcttccttggtgtgcag

SEQ ID NO: 2769 - DNA, 460 bp, homo sapiens
  misc_feature (37)..(54): n=unknown
  misc_feature (157)..(456): n=unknown
atgggttccagaggtattcctctcttaaatgcaagtncctagattaggtagacnttgcttagtattgacaactgcacatgaaagttttgcaaagggaaacaggctaaatgcaccaagaaagcttcttcagagtgaagaatcttaatgcttgtaattnaaacatttgnncctggagttttgatttggtggannnnnnnnnnnnnnnnnnnnnnnnnnnnnnnnnnnnnnnnnnnnnnnnnnnnnnnnnnnnnnnnnnnnnnnnnnnnnnnnnnnnnnnnnnnnnnnnnnnnnnnnnnnnnnnnnnnnnnnnnnnnnnnnnnnnnnnnnnnnnnnnnnnnnnnnnnnnnnnnnnnnnnnnnnnnnnnnnnnnnnnnnnnnnnnagaaccaacactncagtttnctgggaaaggagnaactttgnctcaagacttatagccatcggctccngcctgagntttc

SEQ ID NO: 2770 - DNA, 538 bp, homo sapiens
  misc_feature (134)..(455): n=unknown
gatcctgaaacaaatcccccacaaataccaaaggatggctgtatatagctttatttttagaaattaattcacacaattgttggggttggcaaacttcaaatccatagggcagactagcaggctggaaactcagnnnnnnnnnnnnnnnnnnnnnnnnnnnnnnnnnnnnnnnnnnnnnnnnnnnnnnnnnnnnnnnnnnnnnnnnnnnnnnnnnnnnnnnnnnnnnnnnnnnnnnnnnnnnnnnnnnnnnnnnnnnnnnnnnnnnnnnnnnnnnnnnnnnnnnnnnnnnnnnnnnnnnnnnnnnnnnnnnnnnnnnnnnnnnnnnnnnnnnnnnnnnnnnnnnnnnnnnnnnnnnnnnnnnnnnnnnnnnnnnnnnnnnnnnnnnnnnnntccaccaaatcaaaactccaggaacaaatgtttaaattacaagcattaagattcttcactctgangaagctttcttggtgcatttagctgtttccctttgcaaaactttcatgtgcagttgtcaatactaaagcaaagtctacctaat

SEQ ID NO: 2771 - DNA, 274 bp, homo sapiens
  misc_feature (249)..(267): n=unknown
ccaggcccccggacaaaggcttgagtggatgggatggatcaacgctggcaatggtaaaacaaaatattcacagaacttccagggcagaatcaccattaccagggacacatccgcgagcacagcctacatggagttgagcagcctgagatctgaagacacggctgtgtattactgtgcgagagtctgggctggggaatttactagctttgactactggggccagggaaccctggtcaccgtctcctcagnatccccgacnagccccanggtcttc

SEQ ID NO: 2772 - DNA, 308 bp, homo sapiens
  misc_feature (5)..(289): n=unknown
ggcgngcggctcagtagcaggtnccgtccacctccgccatgacancagacacattgacatgggtgggtttanccgccaagcggatcgatggtcttctgtgtgaaggncagcggcagggcctcgtggcccaccatgnaggagaaggtgtcccccttcttccagtcctcgnntgccacgngcagtatgctggtcacagcganggtggtggtgccctngctggnctcctgccgggatgcccaagtcaggtacttctcgcggggcngctcctgngacccctgcagnnagcganccagcacatccttggggct

SEQ ID NO: 2773 - DNA, 382 bp, homo sapiens
  misc_feature (316)..(370): n=unknown
ggctctgttcctctcccggcatttcctccctgaagcctccaggtttctcatttggtttctgcctgcgttcttttcttttctccacacatcacactggcatgcagcatgttgtggcgtgtgagcatggggtggccgtgggtctctgtccctgactaagccgccccttgtcccttctcagattatgtttgagaccttcaacaccccggccatgtacgtggccatccaggccgtgctgtccctctacgcctctgggcgcaccactggcattgtcatggactctggagacggggtcacccacacggtgcccatctacganggtacgcctcccncacgccatcctgcgtctggacctggctggccgggacctgancgatacctcatg

SEQ ID NO: 2774 - DNA, 161 bp, homo sapiens
gctggggcctaatgttctcacataacagtagaaaaccaaaatttgttgtcatctcttcaaagaatcgagaattgcgtacaaaaaaaccttacataaattaagaatgaatacatttacaggcgtaaatgcaaaccgcttccaactcaaagcaagtaacagcc

SEQ ID NO: 2775 - DNA, 366 bp, homo sapiens
  misc_feature (244)..(365): n=unknown
ccagaggagagtacaggtcgtgctgcagttagttcattgaaaactcatttgctcttggagcagtcaggcagtgactgccttcggctttttttctgctgactaagatctcctatagagagctacaacaatgcccaaaagaaaggctgcaggtcaaggtgatatgaggcaggagccaaagagaagatctgccaggttgtctgctatgcttgtgccagttacaccagaggtgaagcctaaaagaacntcaagttcaaggaaaatgaagacaaaaagtgatatgatggaagaaaacatagatacaagtgcccaagcagttgctgaaaccaagcaagaagcagttgtttnagaagactacaatgaaaatnc

SEQ ID NO: 2776 - DNA, 125 bp, homo sapiens
  misc_feature (59)..(115): n=unknown
tcttcttttccatcttctctctctttttcatcttctttgacttttacatctttcccctnntttttatctnccttnncttttccatcntcattctnntgnccatctcnngtnncnnttctgtcctc

SEQ ID NO: 2777 - DNA, 144 bp, homo sapiens
  misc_feature (28)..(140): n=unknown
catgctgatcaagaaagtagaaactccncgnngccttcangtttgcagtcgcagaaacattgcctgctgtggnctntcancacaaaactgggacantggngncatttagactgtcagcagtgcacntgantgtangatanactc

SEQ ID NO: 2778 - DNA, 366 bp, homo sapiens
  misc_feature (2)..(16): n=unknown
  misc_feature (272)..(330): n=unknown
tnttttacaaaaatangccaccgtctggtacaaacaactataaaaaatcagttcatcatgcaagaaaagtgtgcaaataatttatacagaaggactcagctcacacaatattaaataaacatctctgcatgtaattggtctaactttatgctttagttacaatgttcaaccccctctaatacttttcatttaaaaaagtacattaaagcttctaagcttaggacacaggctgtaatatacgcccactttagccatggtgattggcacttggnagaataaagatggcaccaaggnttcccaagtatagaatacaccntggagccttctgcntaacagacttgtgcttcggtaaattaaacaaacaca

SEQ ID NO: 2779 - DNA, 400 bp, homo sapiens
  misc_feature (67)..(86): n=unknown
  misc_feature (217)..(371): n=unknown
cgtttctgagccaggggtgaccatgacctgctgcgaaggatggacatcctgcaatggattcagcctnctggntctactgctgttangagtagttctcaatgcgatacctctaattgtcagcttagttgaggaagaccaattttctcaaaaccccatctcttgctttgagtggtggttcccaggaattataggagcaggtctgatggccattccagcnacaacaatgtccttnncagcaagaaaaagagcgtnctgcaacaacagaactggaatgtttctttcatcacttttcagtgtgatcacagtcattggtgctctgtattgcatgctgatatccatccaggctctcttaaaangncctctcatgtgtnattctccaagcaacagtaatgccaattgt

SEQ ID NO: 2780 - DNA, 487 bp, homo sapiens
  misc_feature (401)..(427): n=unknown
gaaaccaggggaagagcactaccacctaaggaaatgagatgtgggatatggtgaagataacacatttttttatagaggttgttgagatatctaggtggttggtttggtttgaagctcaggggaaggtctgaaatggacagctttgggagttgctggcatgaatgagaatcaaagtcctagagaggtaagccttcccagagagtatgtaattatcagtttttcaggaatcaaaacctttgccccatcccacctccagctcaatgaccattgccccttcctcaaagggacgatcatggcttctcccccttgcactgggcctgccgagagggccgctctgctgtggttgagatgttgatcatgcggggggcacggatcaatgtaatgaaccgtggggatgacanccccctgcatctggcagccagtcatngacaccgtgatattgtacagacggtacgtaccaaactccttcgtcatccacatcacatac

SEQ ID NO: 2781 - DNA, 508 bp, homo sapiens
  misc_feature (329)..(500): n=unknown
ccctcccatgttgggagacaccatgtggcaagtgacaaagctctgagcccgcccctcttggggccacagtggtagggatgggggaaggggatggaccccatggctggggtagtaccatgactggaggcgggggaggcaaccagaggcctgctgctttggggaggtgcattcccccaaccatgtcccgacacctctggagttcaggcaaggaccttccagtcctacttgtcctgcatcttctcaaggataggcacaatcatgtcaaatttgggtcgctttgcagggtcttcattcatgcagatcttcatgagcttacacacatgaggggnaatacctngtgggatggtaggccgaantttccaatgccaccttcattccaatctccatattggagaggtcagcaaagggnacctcccgtgtcaccagttcccacagaagcactgcaaaactccacatgnctgctgancgtctgtttgtgncttcaggnttcttcttcagancttcgggg

SEQ ID NO: 2782 - DNA, 114 bp, homo sapiens
  misc_feature (58)..(60): n=unknown
ttctccatatatatgaccagaatgtaatgtctctgggcccaaataacttctgattatncntgataatctacatatattatcctgtgttaaggaaaaggcttagtttactttaaa

SEQ ID NO: 2783 - DNA, 186 bp, homo sapiens
ctagggccccagcaaattttatccactttgcctatgcaccgtaagtacaaatgtcgacacggtgaaaatggacagttaactttgatttttatgaaaacagttgtgacttcatctacactcctccctcaaagggtcttaggacctcagtggtccatggagaccatgctttgagactgctggtttaga

SEQ ID NO: 2784 - DNA, 492 bp, homo sapiens
  misc_feature (137)..(137): n=unknown
  misc_feature (351)..(408): n=unknown
catggtgccctgacctgccaggggccctggtgtttgcctccttcgcttagttctccagaccctccctcacatgcccagagccttctgctgacatggactggacagccccgctgggagacctttgggacgtggggtgnaatttggggtatctgtgccttgccctccctgagaggggcctcagtgtcctctgaagccatccccagtgagcctcgactctgtccctgctgaaaatagctgggccagtgtctctgtagccctgacataaggaacagaacacaacaaaacacagcaaaccatgtgcccaaactgctccccaaagaattttgagtctctaatctgacactgaatgangggagaagggaaggagattctgggattgccagttcttccagcagccatgctctgaanatcaaggtagaatccatggaaaaggaccccaggaccccgggaccctagacgtatcttgaactgccatcgtcatttcaaatacat

SEQ ID NO: 2785 - DNA, 440 bp, homo sapiens
  misc_feature (16)..(16): n=unknown
cctacactggttgcanggggagggagcctgccagctgcgaggacctctgtggtggaggagttggtgctgatggtggtggtagtgaccgctatgggtccctgaggcctggctggccagcaagagggcagggttggctagaggaggaagacggcgaggacgtgcgaggggtgctgaagaggcgcgtggagacgaggcagcacactgaggaggcgatccgccagcaggaggtggagcagctggacttccgagacctcctggggaagaaggtgagtacaaagaccctatcggaagacgacctgaaggagatcccagccgagcagatggatttccgtgccaacctgcagcggcaagtgaagccaaagactgtgtctgaggaagagaggaaggtgcacagcccccagcaggttcgattttcgctctgtcctggccaagaaagggga

SEQ ID NO: 2786 - DNA, 520 bp, homo sapiens
  misc_feature (338)..(338): n=unknown
  misc_feature (495)..(516): n=unknown
ttctctggctttgtttcactcttcttcctcttcccctttccccttcaccttcctccatcgtttccacaatgagctctgctgtgcaggtggcttctccaagactgttgacagccttgcaggtgtacttggcatcgtcatccccgcaaacatcactaataattaaagagcagttcccgtcctcatcgtagtctatctggaagtggcgggactccctgattgactggtcatctttgaaccagacaacctcggggtctgggtatccttcaatcttgcagtcaaatctagcagcacttccctccacaacttctaaatcgcgaatggtcttagagaaatagggntttacatgaggcttttcctcagcaacagcctcaaggaaagcttgggacacatcttcttcagattctagtttttctgcattgagcgggctggttggtgaccctgttgaggatttcctgccactgagccctgagatcattgccatagaggacagtcttncaatggctctcacagcnttgnccgt

SEQ ID NO: 2787 - DNA, 485 bp, homo sapiens
  misc_feature (275)..(321): n=unknown
cattatctcatgtgaacttcagggcaacctcgtgagatagtgacagtacactaaccttatagtaacattttatttgatattatttagaagtttttaagttaccactgatgctctaagtcggtctatatctggggaatttcctttgtagcttatattctcagccagtgtcaggcaatgtattcctttaagtgtctcaggccttcctcctgagtccttggtggctgagagtcctggatctggaggcatacctcttgagattagatttcaagtgtgannnnnnnnnnnnnnnnnnnnnnnnnnnnnnnnnnnnnnnnnnnnnnntaagatgaagatgatgagaatggccaagtaatagcctccacctcaaagggttgttgcagggttaaattagttggtccatatacagctcttgaaatgggaccaggcaccacgtggacctgctcagtgagcgtttgccatttttattgctgtggagatgagtgttg

SEQ ID NO: 2788 - DNA, 364 bp, homo sapiens
  misc_feature (326)..(348): n=unknown
acaagtgatttacaatgaagtgtgatgagtgttgtcacaggacacactagatacattaggagcacatagcaaagtaacataattatgtggggcagagagatgacaagggtcacacatggggctggaggccttagtccttggaggtcctatccaaagcaaggctgataaaaaagctgccccaaactgcattgaacatgggaaagttaaggcctgcatggaggaggtgctgctgtggtctggccaatgccagcaggcaggtcacttccttggcctttgggaaaggatggcgatgatggagaaggtcaagaagatcacgccagccatgnctccgatcaccatgcccanganactgccgtgcacctgc

SEQ ID NO: 2789 - DNA, 250 bp, homo sapiens
gtctgacccaaacactagaaccaattgtctaacaaatctagctagcacagtggtggaacttggcttccccatattaaaaaaaagaaacatttaacaccagctctttggtctcaaggaaggtaaatcaccagctgtggataggccaccagtggtgactggggtaacagctgaatataccaggccaacacacatagtcctttggaataaatgtgaagaaagatattgctacaacacactgtaccattacttt

SEQ ID NO: 2790 - DNA, 476 bp, homo sapiens
  misc_feature (292)..(335): n=unknown
  misc_feature (467)..(467): n=unknown
gacctgtataaattatgagattcaaaacagtggcgccactatactgctaaacctatgcatgaaggtagtgactaggatggaaatctgtcagtgctacaaaaatatgtatgaacaaaataattttcaccctttgataaagctacaagatataaaatttagaatacttatataatttcatactagatatgtgaaaaatatgccatgctagaaccatcttgttccaaagtttgaaacatattctgtcaaaaatactcttcgtacaatgtatgaacttatcaataactttctgggnataaagttgtttttatgtcatagtcagatgaagatccttctgnattatatgttgattagaattttgtttcaactggcacctggaagaagacagaaagttcttgttttaaaatactcgtcaagttctgttacaataatcacatcttaggggctagaatttaccagaggtaacaggnttttttttt

SEQ ID NO: 2791 - DNA, 454 bp, homo sapiens
  misc_feature (172)..(287): n=unknown
agcaagagggtaaggatgatcattcatctctatccccagggacgagtacagtcctctctgctaatgaatgttgaaagaatgaatgagtgaaatggaatgaactccctgatgaagtattttaatttacaggtcaacagctttggctaaaggattggaggtatcctggggaganggaanagaaggaggggcacactcagttctgggctgctctttggcccccactctgaagccagatgggggcagagtccagaggggccagggcagttgcctganaggccctcccctancccaccctgagcaggactggagaactcggtctgggccgaggatatggtctttgtccccatggctgtgccctggagccctgagcaccagctgcagaggctgcaggtgacccggaagctgctggagatggaggagcaggccgccttcctcgtgggaagcgccacccctc

SEQ ID NO: 2792 - DNA, 459 bp, homo sapiens
  misc_feature (452)..(452): n=unknown
gagagcctgggcaggcagcagctggctgaccaagtccactggaagagaaggcttgtgccagccgggagaaggaagccggggacaggatgaaagcaacaacacctttgcagacagtcgaccggcccaaggactggtacaagacgatgtttaagcaaattcacatggtgcacaagccgggtctgtacaacccaccctacagtgctcagtcacaccctgctgcaaagacccaaacctacagacctctttccaaaagccactccgacaacagccccaatgcctttaaggatgcgtcctccccagtgcctcccccacatgttccacctccagtcccgccgcttcgaccaagagatcggtcttcaacagaaaagcatgactgggatcctccagacagaaaagtggacacaagaaaatttcggtctgagccaaggagtatttttgaatatgaacctggnaagtcat

SEQ ID NO: 2793 - DNA, 505 bp, homo sapiens
  misc_feature (501)..(501): n=unknown
agattatattatatacataaaatttacatatataaaaatgaagctttaggaaaaaattatttcagaaaacatttatgtacacaggagtacagatatatatcatacgagacttcatgatactctcgttttctctttctctttcgatattttaacttgaaaatgaaatgagcaaaattaatcattaaatctttatgccagcacctatttgagaaacactgacttatatttactgatgtggcactcacacatgtagaaacataatatgtaaatctctttctctgcaatagatatgatattctaatctaatatcctaaagtcacacaccgattatcttacttggagcttccaatattacattaacatgatagagtatgttcttaccttatttgagctcaagctgtgaatcctatcactagaatagctgtgggggattggagggtcagggtagtcctcagcaccttttgtgttcctcttgacgacctccacatagggaaacagggnagat

SEQ ID NO: 2794 - DNA, 465 bp, homo sapiens
  misc_feature (8)..(9): n=unknown
cttcatcnnacttaagtcatagttaagatctgtgatacgaaccatagatattgcctgacaaagcagaaatcaccaagtttcccccttttgaattaccaccaagaagtgttgaaacaccaaatagatatcatgttattttgggcatttgcagttttcttccctgctgcatgtaatgtctcagaatcaacattcttttaaaatctagactatattttgaggcaatgaattacttatattcaacttaggcttgttttgacattcagtagaactttaagttcaatctaaaggcttcagtccacatttttttatacgttgtattttaaaaacgtttgaaaggagtcttacacctgtatcatgaaaactgaatccttttgaaataccactatatgaagagagagatgaaatttagtgaacagaattgaaaaggtgctcataatttcactatggcaaacttacccccagtct

SEQ ID NO: 2795 - DNA, 508 bp, homo sapiens
  misc_feature (305)..(491): n=unknown
tgtttgggctttacaggcatgatttcacggattcaaacaagaaattaacactgatatttagccttctcatgacatacacagaaataacattgctacaaactgcaatggagagaatcttgtttcaaatggcttagtttggggttttgtctaaatgtatcattatataatgaaagcaccaatttgagggtttctcaaatagtgatttgaattttaggacataacagtataacatggtaactttattcttcatatataaataaggcataatcggatgtgtattaatgctgaaaatacattttatcaanagcataaatncaagtatttgggtacacattgaaagttaggacttaaccaatttcttcttacaaaaaatgatnaggaccatatggtatttgttgaatctaaatcagcacttctaatcatttctggtattaaggcgtccttnttcccttctactttaaaccaaccactgccaccaactgaataagggntttccctaaacagcctc

SEQ ID NO: 2796 - DNA, 162 bp, homo sapiens
  misc_feature (16)..(154): n=unknown
aaaaaacatggctatnangtagttnacacattcactataacantggggcgttacaaagantttctacaggggaagtntggatgtaatttccntgaggtagtgaaatcaaagtnatccaaagattataactttnttaaaatgnaaagttcangnnatcatatc

SEQ ID NO: 2797 - DNA, 322 bp, homo sapiens
atcaacagatggagattaagagtcatgtcttcttctccttaattaactgggatgatctcattaataagaagattactcccccttttaacccaaatgtggtgagtatctgtctctcttctaagtatagagaagcccaaagggcatttattttaattcagaattgtctgggggagggttggaaggaatacattggcagatgttttctccataaacctgttattttacctacataaaaagcacatttttgtgtcccaacaaggctcccataatttttagacacatttatcaattcgaagcaccaaaaggcaacaagtgaacatta

SEQ ID NO: 2798 - DNA, 391 bp, homo sapiens
atcaacagatggagattaagagtcatgtcttcttctccttaattaactgggatgatctcattaataagaagattactcccccttttaacccaaatgtggtgagtatctgtctctcttctaagtatagagaagcccaaagggcatttattttaattcagaattgtctgggggagggttggaaggaatacattggcagatgttttctccataaacctgttattttacctacataaaaagcacatttttgtgtcccaacaaggctcccataatttttagacacatttatcaattcgaagcaccaaaaggcaacaagtgaacattattcttatgtttaactgtgtgtagccttttgagattttgtgcttgaagtgggtgattatggaagttgata

SEQ ID NO: 2799 - DNA, 354 bp, homo sapiens
agcgagactccgtttccaaaaaaataagagagaatagaagaagctactgcatgatgttagttaccaagcctgccatgggtcctctcttgctagacacactccatagatccccccactgagctgtggatgggcaaaccccggtggaatcccaccctccccaacaccccactgagccctgggccccctcctcccttcctcacctccaccttctccctgccttctctcttctctcgtctgagcccccaggccttttccactttgagggaggtgcttcgaagaatgttgcccacacctaagtgttagaagcctatgtccgttcatccctgagaggtctgaaagaataaaaataaattc

SEQ ID NO: 2800 - DNA, 468 bp, homo sapiens
tggtggtttagttttctgctttgtggttacaatattgttttttaaatattcaacatgaatacactttcttgtttggataacgtgtaaaacgtctacaaggagggatagataataagttttcccttcagaatgcactgctttgcctgggatgaggaataatttataatggtaactgttgctggttaaaatttggctcctacccacattcatgcaaactcagtgttctagattaaaagagatttaagagacttgccaagcaaatgcatggcatccttagatgtatcctgatttgaataaaacagctataaataataatatttttgggattattgaaaaatttgactatagattagttttcaggtgatattggagaattaatgttattattgttaggtatgttagcacggtcatgcagcaatgtgtctttccttttaagagatgcatacaaaaatatttgggtgtgaaatg

SEQ ID NO: 2801 - DNA, 461 bp, homo sapiens
  misc_feature (262)..(449): n=unknown
tggcatcttgtcaacacctgcggtctcctgcattatcaggaagatcaagacagctggtggaatcattctaacagccagccactgccctggaggaccagggggagagtttggagtgaagtttaatgttgccaatggaggtatgtggttcagtatatgccttaataatcacgatttctttcctcttatattattatagtctcacagtgaccctttgatgatagacaagcaaggtgcagaggacctagctcagaaaaatttagtnaggtgcccaaagtgatccaacaaagaagtggcatgatgggctcatgaacccatttgggtggnctcttggncccctgtactcttcagcataaactattnaatagttgatgcttatctgatatngaaggnctctgaattttaacattaaaacataccctggangtcattgtctaaatgacaatgacccncattttacacat

SEQ ID NO: 2802 - DNA, 453 bp, homo sapiens
ctgagctagggctttttgcaaaggtgattaaaaatcaaggctggagttccagccaaatagggaggagaggtaccacaagttcatcttaaacttgcttccgggctgggtagttaaaacaggaagatcccaaggggatcttacgaggcaaatatcagcaggtaactgtggaagaaaggaaatctcaggacctaatgagttcgttgtaaaatattcctgggaatagatgggggatctactcccagttttttactttttacagaatattgttgctttcctacaacaatgtacatatatttgcagttgtatatgctttttttttttccaaataaacttgtcaccctgcatgcccttggcaaataagtgaagcagaaataggaacacagtccacattcaagttgaggaacagtgtatctttaagagctgagctttgggtgacctggaaagggggaaaga

SEQ ID NO: 2803 - DNA, 465 bp, homo sapiens
  misc_feature (46)..(46): n=unknown
  misc_feature (445)..(445): n=unknown
gctgctccggcccttccgcctccagctcggccatggggtcgcgcantcccacgccgcggtcattcccgacggggacagtattcggcgagagaccggcttctcccaagccagcctgctccgcctgcaccaccggttccgggcactggacaggaataagaagggctacctgagccgcatggatctccagcagataggggcgctcgccgtgaaccccctgggagaccgaattatagaaagcttcttccccgatgggagccagcgagtggatttcccaggctttgtcagggtcttggctcattttcgccctgtagaagatgaggacacagaaacccaagaccccaagaaacctgaacctctcaacagcagaaggaacaaacttcactatgcatttcagctctatgacctggatcgcgatgggaagatctccaggcatgagatgctgcangttctccgtctgatggttgg

SEQ ID NO: 2804 - DNA, 391 bp, homo sapiens
ccctactgcatcaagccccatcatcctagcatgcacccaggaaatcagcaaaaacccatttaagagtccagacttcaagggtccctcacagtaatgggcatctcttgttttgcccgagcagagcagaccactcgtttccccttattctgctaattgtatttcattttcctttaagcaaccacctttcaccccatcctgaatcctcagaccttatttccctggctctaggaattagcacatgacacaggcctggccactcagagtgtttcattcccctagaagtagagatgagaccccaaacgggtcaatgacactctccacttggaattattggaataagtaaatctcttcccactgggttactgggttagcaggatagaagcctggagct

SEQ ID NO: 2805 - DNA, 428 bp, homo sapiens
cttaaaatacaaagtctatattattgcataattttgctgcttctcaatatcatagacacagtgaatagatgatgactatatggcttatatacaaacattctatgtacaatttcaagggagactaaactttaggctaataatctttactattgaatctgtctgatatagatcttagggttgaagaagctatctttgtctatttgggctaaccatagaatttcatttattttcctcacaatattttcctagaccaactccccatcattcacgtgttcctctttactcttactttaactattttgctggcttgcccgaaaatttgcctggcaagtcttccttataagacacatcatggtaagttttgtagtcctgtaagattctggcaacacagtcaagaattatacaatcctactagcaatatataagga

SEQ ID NO: 2806 - DNA, 375 bp, homo sapiens
  misc_feature (212)..(362): n=unknown
gggttcatcccgggtactacccataaacgagtcagtaaatgagacttagtttccaaccttacttcccgactagacaactgcatgaaaaattggatagcgaattatgagtccaagttctatagctggcatagtcctcatgctttagccccagcctctgagcttagcagaagacattttgggtccttatatattgctagtaggattgtataatncttgactgtgttgcanaatcttacangactacaaaacttaccatgatgtgtcttataaggaagacttgccaggcaaattttcgggcaagcctagcnaaatagttaaagtaagagtacagaggaacacgtgaatgatgggganntggtctnggaaaatattgtg

SEQ ID NO: 2807 - DNA, 340 bp, homo sapiens
  misc_feature (2)..(306): n=unknown
gncccccaccttccagccgtcagctcctgggcnccaatgcagctgccctctccagatacctggcagcctcatatntcanccagagcatggctcggcggcaggggcctnggggaggnnncnccgcagcctcccggggctcctggtcctctgctncnacgtcacgggnatcttcnncgnccccccagcnccancnaccatntcccccagnnaggnggctnagctatgccacgacggttaacatccacgttggcgggggtgngannctgcggncagntaagggccaggtccggttgaancancctgctntcttggcctccagcacaggaatctatggggcttc

SEQ ID NO: 2808 - DNA, 431 bp, homo sapiens
cccgctcagctcctggggctcctgctgctctggctcccaggtgccaaatgtgacatccagatgacccagtctccttccaccctgtctgcatctgtaggagacagagtcaccatcacttgccgggccagtcagagtattagtacctggttggcctggtatcagcagaaaccagggaaagcccctaaactcctgatctataaggcgtctagtttagaaagtggggtcccatcaaggttcagcggcagtggatctgggacagaattcactctcaccatcagcagcctgcagcctgatgattttgcaacttattactggcaacagtatgatatttatccttggacgttcggccaagggaccaaggtggatatcaaacgaactgtggctgcaccatctgtcttcatcttcccgccatctgatgagcagttgaaatc

SEQ ID NO: 2809 - DNA, 384 bp, homo sapiens
  misc_feature (183)..(183): n=unknown
  misc_feature (329)..(370): n=unknown
aaagatgagctggaggaccgcaataggggtaggtcccctgtggaaaaagggtcagaggccaaaggatgggagggggtcaggctggaactgaggagcaggtgggggcacttctccctctaacactctcccctgttgaagctctttgtgacgggcgagctcaggccctgatgggtgacttcgcangcgtagagtttgtgtttctcgtagtctgctttgctcagcgtcagggtgctgctgaggctgtaggtgctgtccttgctgtcctgctctgtgacactctcctgggagttacccgattggagggcgttatcaacttccactgtactttngcctctctgggatagaagttattcagcaggcacacaacagnggcagttccagatt

SEQ ID NO: 2810 - DNA, 439 bp, homo sapiens
  misc_feature (351)..(427): n=unknown
gacccagtcaggacacagcctggacatgagggtccccgctcagctcctggggctcctgctgctctggctcccaggtgccagatgtgacatccagttgacccagtctccttctaccctgtctgcatctgtgggagacagagtcaccatcacttgccgggccagtcagacttgtgatacttggttggcctggtatcagcagaagccaggccaagcccccaaactcctgatctataaggcgtctattttagagagtggtgtcccatcaagattcagcggcaatggatctgggacagaattcactctcagcatcaccagcctccagcctgatgatattgccacttattattgtcnacaatataataattatccggagacattcggccaggggaccaaagtggagatcaaagggaactgtngntgcaaccanctgtcttcatct

SEQ ID NO: 2811 - DNA, 434 bp, homo sapiens
  misc_feature (409)..(409): n=unknown
aaagatgagctggaggaccgcaataggggtaggtcccctgtggaaaaagggtcagaggccaaaggatgggagggggtcaggctggaactgaggagcaggtgggggcacttctccctctaacactctcccctgttgaagctctttgtgacgggcgagctcaggccctgatgggtgacttcgcaggcgtagactttgtgtttctcgtagtctgctttgctcagcgtcagggtgctgctgaggctgtaagtgctgtccttgctgtcctgctctgtgacactctcctgggagttacccgattggagggcgttatccacttccactgtactttggcctctctgggatagaagttattcagcaggcacacaacagaggcagttccagatttcaactgctcatcagaatggcgggnagatgaagacagatgtgcagcacag

SEQ ID NO: 2812 - DNA, 631 bp, homo sapiens
  misc_feature (563)..(588): n=unknown
caagcccccaagctcctgatctccggtgggtccaccttgggggcgggggtcccgtcaagatttaggggtcgtggatttgggacttatttcactttaagtattgacaacgtgcagcctgaggatgtcgcaacctattactgtcaacagtctcagactctgtatgtcaccttcggccgtgggaccaagctgatgatcagacgaactgtggctgcaccatctgtcttcatcttcccgccatctgatgagcagttgaaatctggaactgcctctgttgtgtgcctgctgaataacttctatcccagagaggccaaagtacagtggaaggtggataacgccctccaatcgggtaactcccaggagagtgtcacagagcaggacagcaaggacagcacctacagcctcagcagcaccctgacgctgagcaaagcagactacgagaaacacaaagtctacgcctgcgaagtcacccatcagggcctgagctcgcccgtcacaaagagcttcaacaggggagagtgttagagggagaagttccccccacctgctctcagttccagcctgancccctcccatcctttggcctctgancctttttccacaggggactacccctattgcggtcctccagctc

SEQ ID NO: 2813 - DNA, 318 bp, homo sapiens
  misc_feature (292)..(292): n=unknown
aaagatgagctggaggaccgcaataggggtaggtcccctgtggaaaaagggtcagaggccaaaggatgggagggggtcaggctggaactgaggagcaggtgggggcacttctccctctaacactctcccctgttgaagctctttgtgacgggcgagctcaggccctgatgggtgacttcgcaggcgtagactttgtgtttctcgtagtctgctttgctcagcgtcagggtgctgctgaggctgtaggtgctgtccttgctgtcctgctctgtgacactctcctgggagttanccgattggaggggcgttatccacctt

SEQ ID NO: 2814 - DNA, 393 bp, homo sapiens
  misc_feature (68)..(70): n=unknown
  misc_feature (343)..(353): n=unknown
ggctgctcggcgactcagcacaggctcactcagacccggcctcttagagggaagcgcggcgcgggcgngnggtggggcgggccgggggagcggggcccgaacacctgccggcctagcggccgagcagcggggatgtttagacgatcttccagcaatgcgaccgaggctcccccggctttcttgcgttggtgccttggcagggctgggggcggccagctaggggccccttgcctatgaggtctgctgacccagaaactttcctacgagcttccagccaaggaccaagctgaggccgactttgggaacggcagcaccgtggtaaataggcacagcctgtcgtctngcagggtcanccgctcagccagtctgtcttcttatccactcagccggtcc

SEQ ID NO: 2815 - DNA, 135 bp, homo sapiens
  misc_feature (18)..(88): n=unknown
atgagtgaatattgtagnaagcagagacaatgtgccagatgtttggagngaaaangacttggctcctgttctcttagganggacaatnctacacacaatcccaaatcacaggctataagagaggtggccaatcct

SEQ ID NO: 2816 - DNA, 516 bp, homo sapiens
  misc_feature (356)..(443): n=unknown
ctggttaacatgaagaaggatgggagtgagacgtggctggcgtctctgaagggccggttcaccatctccagagacattgccaagaactcactgtatctggagatgactaccctgagagtcgaagacacggctgtctacttctgtgcgaggggcccagactacggtgtccgcgctgattattttgactattggggcaagggaaccctggtcaccgtctcctcagcatccccgaccagccccaaggtcttcccgctgagcctcgacagcaccccccaagatgggaacgtggtcgtcgcatgcctggtccagggcttcttcccccaggagccactcagtgtgacctggagcgaaagggnacagaacgtgaccgccagaaattcccacctagccaggatgcctccggggacctgtacaccacgagcagccagctgaccctgccggcnacacagtgcccagacggcaagtccgtgacatgccacgtgaagcactacacgaatcccagccaggatgtgactg

SEQ ID NO: 2817 - DNA, 272 bp, homo sapiens
aggcgggcggctcagtagcaggtgccgtccacctccgccatgacaacagacacattgacatgggtgggtttacccgccaagcggtcgatggtcttctgtgtgaaggccagcggcagggcctcgtggcccaccatgcaggagaaggtgtcccccttcttccagtcctcggctgccacgcgcagtatgctggtcacagcgaaggtggtggtgccctggctgggctcctgccgggatgcccaagtcaggtacttctcgcggggcagctcctgtga

SEQ ID NO: 2818 - DNA, 438 bp, homo sapiens
cagctaccaacaccacttgtacagccacggttccaccacagccacagtacagctaccacgacatcaatgtctattcccttgcgggcttggcaccacacattactctaaatccaacaattcccttgtttcaggcccatccacagttgaagcagtgtgtgcgtcaggcaattgaacgggctgtccaggagctggtccatcctgtggtggatcgatcaattaagattgccatgactacttgtgagcaaatagtcaggaaggattttgccctggattcggaggaatctcgaatgcgaatagcagctcatcacatgatgcgtaacttgacagctggaatggctatgattacatgcagggaacctttgctcatgagcatatctaccaacttaaaaaacagttttgcctcagcccttcgtactgcttcccccacaacaaagagaa

SEQ ID NO: 2819 - DNA, 76 bp, homo sapiens
  misc_feature (3)..(63): n=unknown
ganattcacagcatcntntaaatnttggcaaagagtnaanaaaatgcatttaaantttggaangtgcacacataag

SEQ ID NO: 2820 - DNA, 441 bp, homo sapiens
  misc_feature (24)..(151): n=unknown
  misc_feature (254)..(407): n=unknown
tggacgcgctgaaccacggccggnnggangggcggggcngggctgaaccatggcgggcggcggcatgggggcggnggggctccgcgggcagcntggttgcnctgcacccggacggggccgaggggacctgaaagctgcggcagancctgancgcgccgttctccagaagagccccggccgcggctgagtcgcgctccgggtgtggacggagccggagcctccccggggctcggtgaggacacagggcccaagcnccggaccttcaagtcttgaccgancgcatccccggcccttctgcncccacacctgagtttttgtctgtnggagtttccgcagtttgctaagaatcgacatctagaggagtactcaccacttaattgatgatcaatacacgttccttgaaaganccgtaccatgcgatcggtacagagcatctgcact

SEQ ID NO: 2821 - DNA, 398 bp, homo sapiens
  misc_feature (30)..(30): n=unknown
  misc_feature (244)..(396): n=unknown
gtcctatttaatccccaaaacagtcctganggggagataaggcagttatcttcatagtacaggaaaggaaaaaagcgagggtccaaggccgactataccctcagctccattagcccccgaggcctccctgacaggcggggcggacaatcccagtgcagatgctctgtatcgatcgcatgctatcggttctttcaaggaacgtgtattgatcatcaattaagtggtgagtactcctctagatgtngattcttagcaaactgcggaanctcctacaganaaaaactcaggtgtgggcgcagaagggccggggatgcgctcggtcaagacttgaaggtccggngcttggnccctgtntcctcaccgagcnccgggnnngctccggntccntnnacacnngg

SEQ ID NO: 2822 - DNA, 214 bp, homo sapiens
gttacttacagtagcacagaaatgttagcatatttatttaaatagtcctgcagcagagaccctgcgattgtaaagtgatttaagtatttctgggtagtgtttgtgatttacggatttgttactgaaaaacaaaaaaaatcactactgtgaatttactactatgtaaccttgtggtcgtatttcattataaataaaataagaattgctcttctgc

SEQ ID NO: 2823 - DNA, 478 bp, homo sapiens
ctcttgctccctcggccgggcggcggtgactgtgcaccgacgtcggcgcgggctgcaccgccgcgtccgcccgcccgccagcatggccaccaccgccacctgcacccgtttcaccgacgactaccagctcttcgaggagcttggcaagggtgctttctctgtggtccgcagtgtgtgaagaaaacctccacgcaggagtacgcagcaaaaatcatcaataccaagaaattgtctgcccgggatcaccagaaactagaacgtgaggctcggatatgtcgacttctgaaacatccaaacatcgtgcgcctccatgacagtatttctgaagaagggtttcatacctcgtgtttgaccttgttaccggcggggagctgtttgaagacattgtggccagagagtatacagtgaagcagatgccagccactgtatacatcagattctggagagtgttaaccacatccaccagcatgacatcgtc

SEQ ID NO: 2824 - DNA, 482 bp, homo sapiens
  misc_feature (86)..(86): n=unknown
cttgccgggcagcccgggcagagaccatgtttgacaagacgcggctgccgtacgtggccctcgatgtgctctgcgtgttgctggcntccatgcctatggctgttctaaaattgggccaaatatatccatttcagagaggctttttctgtaaagacaacagcatcaactatccgtaccatgacagtaccgtcacatccactgtcctcatcctagtgggggttggcttgcccatttcctctattattcttggagaaaccctgtctgtttactgtaaccttttgcactcaaattcctttatcaggaataactacatagccactatttacaaagccattggaacctttttatttggtgcagctgctagtcagtccctgactgacattgccaagtattcaataggcagactgcggcctcacttcttggatgtttgtgatccagattggtcaaaaatcaactgcagcgatggttacattgaataacta

SEQ ID NO: 2825 - DNA, 486 bp, homo sapiens
  misc_feature (240)..(240): n=unknown
aggtggggcactgttttggtggaaggcttggagtttttttaatgagtttagagctattagataaccactgagttaaaggtaactatgtacacacaaagtgtgcatccaagaggcatagcagcagcagaagtctttaaaggcttgtacaccaggaagaaagatgcatcctcttgccttgtggcaatcattttcctttagaaaacaggccagcttcacctgggcaccctgctgcctttcaangctggtgattgctcggatagtgattcccagttgttggtgtttcatgcagagttgtatgagagtcctcctcttttctttctttaaaagaagttctttctttgaagaaatccgatacatatacagcaactaatattgcaaccagagctccctgaatgagtccagtcaacacatcgctccagtggtgtttataatcagaaactcgagaaaggcccacataaatggatacggcaacaagaccaaattgca

SEQ ID NO: 2826 - DNA, 486 bp, homo sapiens
  misc_feature (13)..(13): n=unknown
  misc_feature (260)..(289): n=unknown
  misc_feature (480)..(480): n=unknown
cacagccgaaggnaaagcagcaggttggggcttcttgtggccaacttcagagcctgtcaccaggaaaggtaagcatgggaggaaggaagatggcgacagatgaagaaaatgtctatggtttagaagagaacgctcagtcccggcaggagtccacgcggaggctcatccttgttgggagaacaggggccgggaagagcgccactgggaacagcatcctgggccagagacggttcttctccaggctgggggccacgtctgtnaccagggcctgcaccacgggcagccgcangtgggacaagtgccacgtggaagtcgtggacactccggacattttcagctcccaagtgtccaagacagatcctggctgtgaggagagaggtcactgctacctgctctcggcccccggaccccacgcgctgctcctggtgacccagttgggtcggttcaccgcccaggaccagcaggcggtgaggcagtganggacat

SEQ ID NO: 2827 - DNA, 395 bp, homo sapiens
cagcgagcacatgaagcggttcttcgtgaactttgtggttgggcaggatccgggctcagacgtcgccttccacttcaatccgcggtttgacggctgggacaaggtggtcttcaacacgttgcagggcgggaagtggggcagcgaggagaggaagaggagcatgcccttagtacgggcaccggcttcccctacagatggtcacccacctgcaagtggatggggatctgcaacttcaatcaatcaacttcatcggaggccagcccctccggccccagggacccccgatgatgccaccttaccctggtcccggacattgccatcaacagctgaacagcctgcccaccatggaaggacccccaaccttcaacccgcctgtgccatatttcgggaggctg

SEQ ID NO: 2828 - DNA, 435 bp, homo sapiens
  misc_feature (408)..(408): n=unknown
aattctgttttcccatgagttatggccccaggaatagattagatctggacataggacaaggtgacatcaccctggatttccaatgtgtccaccctctggaaggccgagaggcgatgggcaaagtcaaagaggtgctggccattggcgtaaaccttgaagcgatccaagccacagcgaatggacagatcaaagaactgtccgggaccaaatgggttgtgggtgatcttcttctcctcggatccccacgagccattcagaaggctgttccggaccacggtaccgttgcccatgcggggattaatgtgcagagctatgtcccctgaggagcccaccttgaagttgatagcaaagctcttgcctgtgggaggcacatagcccttgatgatgatggttcttcgagctgtgagncctccttgcagcctcccgaaatatggc

SEQ ID NO: 2829 - DNA, 354 bp, homo sapiens
  misc_feature (354)..(354): n=unknown
gattgggggactggtgttcgctgtggtcctcttctcggttgggatcctccttatcctaagtcgcaggtgcaagtgcagtttcaatcagaagccccgcaacagagccccagaaagcagagaactgaagtgcagccatcaggtggaagcctctggaacctgaggcggctgcttgaacctttggatgcaaatgtcgatgcttaagaaaaccggccacttcagcaacagccctttccccaggagaagccaagaacttgtgtgtcccccaccctatcccctctaacaccattcctccacctgatgatgcaactaacattgcctccccactgcagcctgcggtcctgcccacctcccgtn

SEQ ID NO: 2830 - DNA, 475 bp, homo sapiens
  misc_feature (93)..(93): n=unknown
ttgttgaggatagatcacgatacagagaacagcaatgggtcacagcgcacggtttggttggtttccgcgggaacacagaggacaggaggtgcnggatctgggttgagttcccactctcgttatgaccttcaacctctcactgttcccaagggctgcacggagcctgctgagtctccaacccacctcgctcaccgctctgaccaccgacaggcagagcaaaggatgcgggagttgcctctgctgcccatctaaggggacgtaggcagagaagcaaaggcctctgctctccctccatccatcccggtgtgctggccccaacggaacaggagtccttcaactattgcctgccagagacccaattgcagggactgtagtctgcatctggatgagctgggctgtagattgaagtctcagaagcagggaaggttggaaggggtagggtcccagagcccatggagttattgctgagaagata

SEQ ID NO: 2831 - DNA, 227 bp, homo sapiens
gctcctgctgccctgtgggtgtgccaagtgtgcccagggctgcatctgcaaaggggcatcggagaagtgcagctgctgcgcctgatgtcgggacagccctgctcccaagtacaaatagagtgacccgtaaaatccaggattttttgttttttgctacaatcttgacccctttgctacattcctttttttctgtgaaatatgtgaataataattaaacacttagactt

SEQ ID NO: 2832 - DNA, 198 bp, homo sapiens
cagaaaaaaaggaatgtagcaaaggggtcaagattgtagcaaaaaacaaaaaatcctggattttacgggtcactctatttgtacttgggagcagggctgtcccgacatcaggcgcacagctgcacttctccgatgcccctttgcagatgcagccctgggcacacttggcacagcccacagggcagcaggagcctcgag

SEQ ID NO: 2833 - DNA, 460 bp, homo sapiens
  misc_feature (99)..(99): n=unknown
ggcgcggagtggctgccctgcgcggggacactcagagcccggtgggcgggaggaaggcggcatgccccagacggtgatcctcccgggccctgcgccctngggcttcaggctctcagggggcatagacttcaaccagcctttggtcatcaccaggattacaccaggaagcaaggcggcagtgccaacctgtgtcctggagatgtcatcctggctattgacggctttgggacagagtccatgactcatgctgatgcgcaggacaggattaaagcagcagctcaccagctgtgtctcaaaattgacaggggagaaactcacttatggtctccacaagtatctgaagatgggaaagcccatcctttcaaaatcaacttagaatcagaaccacaggaattcaaacccattggtaccgcgcacaacagaagggcccagccttttgttgcagctgcaaacattgatg

SEQ ID NO: 2834 - DNA, 425 bp, homo sapiens
  misc_feature (342)..(342): n=unknown
aatacaaaactaaagaaattcagggaatttctccctaacatgcactgtaatagttaaaacacatacagacaactgcagattatgttagaatacaagattgttatttgctatttaccacaattgcaaaatcaacttgtcaaggaaagacaattagagtccttcaaatatcttgatgtttatgtgtttgatggctgtaatatacatgtaaattgtggagtatgacatacaaaaaattattgctttaaatatcattattgctagccccaaaaagagttgcaaaacatagctaagtgtatgtttttttcacatagcaggcatttgcctcccattccttttcctcantaaacaataggataaaggtctaaagccttgactttagatttggagttgacaatctgcacaatccttctgcccaaagccatgaa

SEQ ID NO: 2835 - DNA, 306 bp, homo sapiens
  misc_feature (301)..(301): n=unknown
gaagagttctaagttttctaaaccttaactgttccttaaggattttagccagtattttaatagaacatgattaatgaaagtgacaaattttaaattttctctaatagtcctcatcataaactttttaaaggaaaataagcaaactaaaaagaacattggtttagataaatacttatactttgcaaagtcaaaaatggcttgatttttggaaacaatatagaggtattcatatttaaatgagggtttaccatttgttttgttttgtaaccgttaaaaagaagttgtttcccagctaattatngtggt

SEQ ID NO: 2836 - DNA, 460 bp, homo sapiens
  misc_feature (429)..(460): n=unknown
aaaaaacacagttgttttcagcatttcctagctacagtagtgcataggaaattccattctaaacaaagaagtaattaatgaaataacaacacaccttaacattttacattgataggttacagtttacaaggtgctttcacatacattatttcatttgattcttacaacaagcagaaaaaacagtgggaaagattttttttttcaggcttacaatgagtattttcaggccaatgggcagttaacacaagaatataccaagaatgagacagcaatacccataagccacaatatcgtttttggtaggttgacagtttgattcaactgggtattcagcatcggtgagtgagaaaggaattaggacagacaccaaggctcttatgatattcaaataattttaagaacactgtcagagattagaaagaaagatgncccnaaatatattgncttattggggcntacn

SEQ ID NO: 2837 - DNA, 249 bp, homo sapiens
  misc_feature (33)..(81): n=unknown
cttgagcggcatccgtggagtgcgcctgcgcanttacgaccgcagcaggaaagcgccgccggccaggcccagctgtggccngacagggactggaagagaggacgcggtcgagtaggttttaaaacatgaatcctacactcatccttgctgccttttgcctgggaattgcctcagctactctaacatttgatcacagtttagaggcacagtggaccaagtggaaggcgatgcacaacagattatacggca

SEQ ID NO: 2838 - DNA, 255 bp, homo sapiens
  misc_feature (4)..(213): n=unknown
gctnatcaangtcaggcttcgntaagtaagtggctctgaantaactgcaggtccagcnagctcaggtcaagtccatatttctcattaatgggnccangctgaagggcnagctgcttcccagnggnanntnttctcatgcacatggcagagcangataacatncccnagtncnnangcatatntcaancccctgtttgngttatgtctgctaanatcccattggtcaaagacaaacacaatgcccagccttacagg

SEQ ID NO: 2839 - DNA, 402 bp, homo sapiens
  misc_feature (7)..(393): n=unknown
ccgagantcnnggacgtggcngngaggggncctgtaaatctccagataccaaanctggaagggcgtggagtcttctccagttctcctagtttacagatgttgtgacctaggcttacaatgggcctggggtctgaaagcgggacntgngcngcnngggtcaaanagcnggtttggtggangtcagcgccacagcgcgccgtgccaggnagnctttattctgcgcctccgtctgtntctnacgtttgaactcagagatnangcgtccgtaggagttagccagagccacagtgtacgccatcaggatgctcgagatnagcanaatgggcacagcaaaancctgggtccccaggaanaagacgaaattctnggtggtctcanggnggctggaaatanactcatgga

SEQ ID NO: 2840 - DNA, 444 bp, homo sapiens
gaaacccttttccattgaggaggtggaggttgcacctcctaaggcccatgaagttcgtattaagatggtggctgtaggaatctgtggcacagatgaccacgtggttagtggtaccatggtgaccccacttcctgtgattttaggccatgaggcagccggcatcgtggagagtgttggagaaggggtgactacagtcaaaccaggtgataaagtcatcccactcgctattcctcagtgtggaaaatgcagaatttgtaaaaacccggagagcaactactgcttgaaaaacgatgtaagcaatcctcaggggaccctgcaggatggcaccagcaggttcacctgcaggaggaagcccatccaccacttccttggcatcagcaccttctcacagtacacagtggtggatgaaaatgcagtagccaaaattgatgcagcctcgcctct

SEQ ID NO: 2841 - DNA, 529 bp, homo sapiens
  misc_feature (188)..(188): n=unknown
  misc_feature (463)..(463): n=unknown
agctgatgttcaacactttatttagttctcatttggattttaaacatttgcttgaaaaataattttacatcaatttccatttctttggaaagcccccaaatgtaatttattgataaaatctgtgatgagcagaattaatgatatttcccagctgttgctccagatcatgtagggtagaggaggctgangactgccacaagggaaaacatctgtattgtctcaaaacatcagaatggtacggatacttttcccagagtgaagcaggtcaaatccttcatttattttttcaaaaggtaaaacatgggttattaatgcatccaatgaaaacttcttagccataaaatcagccacaagttttgggacacattctttacttttaaagccaccaagaatagctcccttccaggtacgtccagtcagtagcagcatagggttcattgagaggtttgggatcaggaggtanccctacgatgacacttgtgccacatgcctcatgacacataccagggaagccatcatggtgtcagcc

SEQ ID NO: 2842 - DNA, 411 bp, homo sapiens
  misc_feature (276)..(371): n=unknown
gtgaatatgtgattctttaaggctgcaatacaagcattcagttccctgtttcaataagagtcaatccacatttacaaagatgcatttttttcttttttgataaaaaagcaaataatattgccttcagattatttcttcaaaatataacacatatctagatttttctgctcgcatgatattcaggtttcaggaatgagccttgtaatataactggctgtgcagctctgcttctctttcctgtaagttcagcatgggtgtgccttcatacaataatanttttcnctttgtctccaactaatataaaangntttgccaaatcttacaatttggaaagtaaaaattaaaccagagtgatcaagtaaacccatacnctatctctaagtaacggaagggagctattggggctggtaa

SEQ ID NO: 2843 - DNA, 504 bp, homo sapiens
  misc_feature (231)..(257): n=unknown
  misc_feature (479)..(479): n=unknown
actgtacatccacatacttcaataaatagttaaaaacctgacctctttttaaatcatttctggatttcaaaaaacaatttttattgaaaagattaaataggtaacttttggctgtgtcacaaagctaagcacaatggataaattaacaattgttcagtaaatttgatcattatagatgattgactttgataattcagtttttcagagttttctgacttcaaatgtaggggnnnnnnnnnnnnnnnnnnnnnnnnnnnttccctgaattacctgggtaattttctcagttctccagtctactttctagatatagcttaaatgttatgatgaagcattaatttttcagttaagttataaacccccccaaaagtggctttaagtttgaaattctccctctcaaatcttttagtgtctcaaaaacacccacattactataacttgggcagtactttttattatataattgctgcataataggnacttaatggtataatagggctatgt

SEQ ID NO: 2844 - DNA, 427 bp, homo sapiens
gccagtaactttcacatgtagagtggctggaaatccaaagccaaagatctattggtttaaagatgggaagcagatctctccaaagagtgatcactacaccattcaaagagatctcgatgggacctgctccctccataccacagcctccaccctagatgatgatgggaattatacaattatggctgcaaaccctcagggccgcatcagttgtactggacggctaatggtacaggctgtcaaccaaagaggtcgaagtccccggtctccctcaggccatcctcatgtcagaaggcctcgttctagatcaagggacagtggagacgaaaatgaaccaattcaggagcgattcttcagacctcacttcttgcaggctcctggagatctgactgttcaagaaggaaaactctgcagatggactgcaaagtca

SEQ ID NO: 2845 - DNA, 130 bp, homo sapiens
  misc_feature (3)..(101): n=unknown
canaggaatatgttggtcaaggcaatggctgtttcagtgtttcagctttaanangaatgctggattacaggccctnnnnnacnnntttggcngtattcagngtcacgtgagatgggttggcctcaggttg

SEQ ID NO: 2846 - DNA, 415 bp, homo sapiens
ctggagtggcagtggctcccaaggctctctcctccaacatgtgcatctgccatctgctctgcagtcctgccgcaggattccctagtgaagcagctcaggcctgggggagcgtgtgtatcccagctgtgccggcagcatcataccaatcgtgggggtggtgaaggagccaggggttcattcatggttggtttctgatcaggcatcttgggaatggataatggaggcagccgctttcaggacaggcatgtccaggggctcctcccagcctctacccccgaagtctcttccccaagtgacccccagtgatgtttccattgagatgcgctcctggctatggcaggcacttctcaacttatatgtgggaaggggtcccccatgcttgggggactaggcaactggcttggcccaagagaga

SEQ ID NO: 2847 - DNA, 466 bp, homo sapiens
gcagacccaggtcttcatttctctgttgctctggatctctggtgcctacggggacatcgtgatgacccagtctccagactccctggctgtgtctctgggcgagagggccaccatcacctgcaagtccagccagagtgttttctacaactccaacaataagaactacttagtttggtaccagcaaagaccaggacagcctcctaaaatgctcatttactgggcatctacccgggaatccggggtccctgaccgattcagtggcagcgggtctgggacagatttcactctcaccatcagcagcctgcaggctgaagatgtggcactttattactgtcagcaatattttactactccgtacacttttggccaggggaccaggctggagatcaaacgaactgtggctgcaccatctgtcttcatcttcccgccatctgatgagcagttgaaatctggaactgcctctgtt

SEQ ID NO: 2848 - DNA, 461 bp, homo sapiens
  misc_feature (421)..(421): n=unknown
aaagatgagctggaggaccgcaataggggtaggtcccctgtggaaaaagggtcagaggccaaaggatgggagggggtcaggctggaactgaggagcaggtgggggcacttctccctctaacactctcccctgttgaagctctttgtgacgggcgagctcaggccctgatgggtgacttcgcaggcgtagactttgtgtttctcgtagtctgctttgctcagcgtcagggtgctgctgaggctgtaggtgctgtccttgctgtcctgctctgtgacactctcctgggagttacccgattggagggcgttatccaccttccactgtactttggcctctctgggatagaagttattcagcaggcacacaacagaggcagttccagatttcaactgctcatcagatggcgggaagatgaagacanattgtgcaaccacaattcgtttgatctccagcctggtccc

SEQ ID NO: 2849 - DNA, 484 bp, homo sapiens
  misc_feature (436)..(436): n=unknown
ctgtaatatatcggatacaggccctaagtctatgttccgatcaacaatctcatctggaatttagagtcaacagaaacaatctggagttgtcgacaccacttaaaatagaaaccatctcccatgaagaccttcaaagacaacttgccgtcttggacaaagcaatgaaagcaaaagtggccacatacctgggtggccttccagatgttccattcagtgccacaccagtgaatgccttttataatggctgcatggaagtgaatattaatggtgtacagttggatctggatgaagccatttctaaacataatgatattagagctcactcatgtccatcagtttggaaaaagacaaagaattcttaaggcatcttttctctgcttataataccttttccttgtgtgtaattatacttatgtttcaataacagctgaagggntttatttacaatgtgcagtctttgattattttgtggtctttccctggg

SEQ ID NO: 2850 - DNA, 185 bp, homo sapiens
  misc_feature (25)..(175): n=unknown
tttattgttaaaaactgtcagtganacatctgatacacatctggctatgaatggtagattcaaacgtgataaaactgccaccttnanatncntcanagtancagcaggcacnnggnaatcttanctcnntanntcnttgattacaatgatangntnttcactatatncctctntngttgtccctt

SEQ ID NO: 2851 - DNA, 298 bp, homo sapiens
  misc_feature (141)..(266): n=unknown
atttaagacctttattaacaggtgcttgcagtttcctgtgcctaggtttaaaacttgcctcctttcaaactcatgctcttttcccctacctacccttatcaaaagcattttccagagggaaccatggaaaccccagcgcanttctcttcctcctgctantctggntcccanatacctccggngaaattntgttnacgcagctccaggcaccctgtctttgtctccaggggaaagagccaccctntcctgcagggccagtcagagtnttagcagcaggtacttagcctggtaccagcag

SEQ ID NO: 2852 - DNA, 429 bp, homo sapiens
  misc_feature (17)..(339): n=unknown
ttaaagccaaggaggangangggggtgangtgaaagatgagctggaggaccncaataggggtangtcccctgtggnaaaanggtcagaggccaaaggattggagggggtcaggctggaactgangagcangtgggggcacttctccctctaacactctcccctgttgaagctctttgtgacgggcgagctcaggccctgatgggtnacttcgcangcgtagagtttgtgtttctcgtagtctgctttgctcagcgtcanggtgctgctgaggctgtaggtgctgtccttgctgtcctgctctgtgacactctcctgggagttacccgatttgagggcgntatccaccttccactgtactttggcctctctgggatagaagttattcagcaggcacacaacagaggcagttccagatttcaactgctcat

SEQ ID NO: 2853 - DNA, 274 bp, homo sapiens
gtcctttccccatagttgtcctatgcctttgggctttagtctatcccaggactaactgtggagaaatcattggtttgagagtcaagagagcattggtttgggagctttaatcctctttctgcttcacactaagtgtgtcatcttggctaaatcacttggtctttctgcattttgttttcttatttataggatgaggaaattagattaaatggttttgaggtcctttcttgttctgatatgtccagtactcactggaaaaattggatctataact

SEQ ID NO: 2854 - DNA, 623 bp, homo sapiens
  misc_feature (98)..(98): n=unknown
  misc_feature (205)..(250): n=unknown
  misc_feature (494)..(574): n=unknown
atttccttggaacatcttcatctctttccattttgcggacactccccttcttctattctcctttactcaaaacatatggtttagacccacatcatggntttcttgtgggaaacctggatgggactaggaaaacacatgttccaacatggtgcatatctgttgtgcagatatcagacaagattaatcctgtctaacttatgcgtantgtttgatgtttgcctgtggntattctgggcacagcaatggtngncattattgaaaatgaactttattggcagatgaaagataatagaacatgaagatttatgaactaccataagctctgcatctctgggtcttcatttccaaagcagcacttggaaaaccaagcccagttcaggcaaagagtcctttcttctcaccagcacttgaaatggtccagaatatacctgatgtcacaccaacttcctcatccaacttctgaaatgaaaaggtcattccccaatgggtgctanatcttttccaaganggacttnccctttcttaaaattctgaaaaattcctttccatttcatacactggaacctgacttcanttcttaataaataattttatcatctctatcatccagaatttcttcttct

SEQ ID NO: 2855 - DNA, 473 bp, homo sapiens
caaaattacatttaaaacagtggattgttctacaaatatatatgtgtatatatacatatgcttctgaaataaggatatattatatgagtttttatttgatttgtggtctttagtcataggtaatcaaaaataaagagatttgaatgcaaaactttatacattaatgtacatttctaatgatggtacaaattgccactttataataaaaaagaaacaggtgggaataataatcaaagcacgtgttccttcagtactttggtgatttttaatcccccttgtgatgcacaggaaattattttttagttacaaaaagttatcttagaaatctatacttcccaatacagatttcatgttaagtcatatcaaattgagaatttgtggtgaaagaataggaaaagggatgctagatgctgatctttctttttcagggatttttcccgggaggcccaagttaaaaattccatacttaaatc

SEQ ID NO: 2856 - DNA, 219 bp, homo sapiens
  misc_feature (77)..(86): n=unknown
gaagaagaccgtgttactgcagaacctgccaagtctgtcatcactgtggggtgtagcctgcctcagagggacctgcnatcaccncnctgagctcagtggtattttgagaatttaatgtttaactgtacccctttccctcaggaagatttaacatttgcttgggaatgtgattttgctcccaccctaaggaatttttatcaccaaaatgaatgttaatga

SEQ ID NO: 2857 - DNA, 178 bp, homo sapiens
ggagcaaaatcacattcccaagcaaatgttaaatcttcctgagggaaaggggtacagttaaacattaaattctcaaaataccactgagctcagagaggtgattgcaggtccctctgaggcaggctacaccccacagtgatgacagacttggcaggttctgcagtaacacggtcttctt

SEQ ID NO: 2858 - DNA, 382 bp, homo sapiens
  misc_feature (132)..(132): n=unknown
  misc_feature (248)..(335): n=unknown
ggcaagtgtaccgaggaaggggatgcctcacagcaagagggctgcaccttaggttctgaccccatctgcctcagtgagagccaggtttctgaggaacaagaagagatgggagggcaaagcagcgcggcccangccacggccagtgtgaatgcagaggagatcaaggtagcccgtattcatgagtgtcagtgggtggtggaggatgctccaaacccggatgtcctgctgtcacacaaagatgacgtgangnagggagaaggtggtcaggagagtttcccagagctgccctcagaggagtgaaagggacaatttggctgaagtctttctctgaaaanagccaaagggttataggggtacacttaggggttgcatgcaagctgtt

SEQ ID NO: 2859 - DNA, 586 bp, homo sapiens
aatgtttgtttaattgacgggttttaagctcgataacttagctaagccctttgcacagtctaagcctaatttggaatgctttcagtcttacccaggccaataaaattttcttgcctcatctgaatttcctgcaaatgtgattaattaataagaatcatcaagattaattaataagaaattgatagcaggatgagtaacaggcccagacagtcccacagatcacaccttccaccctccatttccgcttagcttctcttgaatctattgggcatgattgcctctgtgggggctacagccagcacgggtgactgttcatgacctaccctctcttgcagtctgactgtggacaaatgccgagtccttaagagatggtgaagtaggcatagtagatagtaaaggtagacttacagtatacatttgcattctcaaacaaaattaaaaagccttaaagtgcacaagaagattgcacaattgaaaagtgcagagtatactcaaaactgtcatcctactgttttctcagtcttccctggcaatactattccctcctcagacatcctcagctccctctcaccccaagtatgccatt

SEQ ID NO: 2860 - DNA, 143 bp, homo sapiens
  misc_feature (141)..(141): n=unknown
gaaactaatcccaataacaatcatcaagcaagtgattcagaatgttactcacaaggattcagctaaatccccagaaaaagctccactgggaggagtgatactagtccaccttattattccaggtcttaatgaaactactgnaa

SEQ ID NO: 2861 - DNA, 372 bp, homo sapiens
  misc_feature (17)..(361): n=unknown
tggacactaacattaanagttttnttncaggangnntttagnnatcaaancagttctactgananaattgcaacaacgtggcncctgttcatgcnaancacaaaaaacatttncaataaaactttgtactatctttacttaaacatctgaacagcatctcaatatgtaccttattctattctatagagtacagttattaataacttttagnncccntgtctgataattttaacatctcnagcagttctggnttgactttgattgaacagtttctcctcattatgggtcctatggncctgccnacttngcattcctgntaacttctgattgggtgccagacagcaagacttttacnngantnggtgccggaca

SEQ ID NO: 2862 - DNA, 313 bp, homo sapiens
  misc_feature (29)..(311): n=unknown
caatttaaacaccagtcccgaaatttggntcttcnttctnttngaatctctcaaacggcaacattcctcagaaaccaaagctttatttcaaatctcttccntccctggctggttccatctagtaccagaggcctnttttnctgaagaantncaatcctngccctcattttaattatgtacatctgtttgtagccacaagcctgaatttntcagtgttnngtaagtttntttaccntaccctcaantatatatnattctcngagnttaaaacccataaaggagtgntttagaccagtcanttaattttcaanct

SEQ ID NO: 2863 - DNA, 423 bp, homo sapiens
  misc_feature (86)..(86): n=unknown
  misc_feature (230)..(420): n=unknown
gccagcagtcctgagtaggagtccaggactcccaactgtctcaatctgcaaattgttcctatccaggttcagggccttcagggggntcttttcattttctcccacaggcctctctttctttctaggttgctggggagaaatgggtaccctatgatccccctccccttctcctccagtaaatacctggaagagggaacctgaatccctgggggagacagaaggggcagggngcaccagcctccccttcttgtggtgagactgaatttgggctcagacaccagcaanagcctcttgggatgccctgagttgcttcccanttcctctttctagccgtccttttcnagtgtgtgctcagtcttcctaggancttttaagacttnttggtactatgaaataggtctcccctnaacccaactctangtt

SEQ ID NO: 2864 - DNA, 648 bp, homo sapiens
  misc_feature (138)..(312): n=unknown
  misc_feature (415)..(621): n=unknown
ttaatttttttctcccatagaggaataccattacagtctaacaatcagaattctgttacacacatacacaggcatgccacatgacccagttgaggtggttgtctccttgagtctgttgacacgtcacatggtcaaagnctcctcatttcanncagtctcaacacaaaacacccaacanggatgcactcaacttgttnggttccatgtggnactaggtggcagggcgagagggaaagtagtacaagggggctatggtgtgtcttcattcagtcccctcacataaagcacatggattaggggggtatccaagantcttgtggggtccgtgttgcacctaagacattataggtcagagcaagttgtcagagggttccaggcagggggcttgggacaaggcatactctaaaacagcacnaaacttgcattcatacacnggtgcccctgcttgggggctaagactggcaaaangctggaaagacaacccaagcttgaaagggaaccaactcaagacttacttgggggaataacttggaagtcactgtttgatgtnactggggactcactctagnaacggggtccctctgacaagttttggcaaagtgctggtagtactgacattantactcacaaattggtacaaactcctct

SEQ ID NO: 2865 - DNA, 552 bp, homo sapiens
  misc_feature (263)..(263): n=unknown
  misc_feature (364)..(364): n=unknown
ctccactttcagacaaggtggagttgggtgtcataggagattctgtacacatggaagggttgccagggagcagcacatccatcaggcacatcagcattgggcctcagaggcatcagaccacccagcagatagtttaccatgggctggttccccaactgggggaatctggtgactcagagagcactgtgcacggagagggctcagcagatgtgcaccaggccactcacagtcatacctcgggtagacaaaccgttatgactganaagagcaccttccaaagtgtcgtttctgaatctccccaggaggatagtgcaggggacacatcaggggcagaaatgacatcgggtgttagcagatcctttangcacattcgactaggtcctacagaaacggaaacctctgaacacattgccatccgtggacccgtgtccagaacatttgtgcttgctggttcagcggactccctgagctaggcaattagcagacagcagcagaacgctaaggcacattgcaccagggcccaaagaaattcgttactttcagatgggtgtg

SEQ ID NO: 2866 - DNA, 548 bp, homo sapiens
acatttcccattgtagggaacaggagtttagcaaaatcagcttcttagatgatgtcattctaaatatacatcttaaacaaacaatatcaaaaccaccagtaggaaactgaaaaacactcagtgagtactgttttgtctcagtaacaataaatacaaaaagactggttgtgttccggccccatccaaccacgaagttgatttctcttgtgtgcagagtgactgattttaaaggacatggagcttgtcacaatgtcacaatgtcacagtgtgaagggcacactcactcccgcgtgattcacatttagcaaccaacaatagctcatgagtccatacttgtaaatacttttggcagaatacttcttgaaacttgcagatgataattaagatccaagatatttcccaaagtaaatagaagtgggtcataatattaattacctgttcacatcagcttccatttacaagtcatgagcccagacactgacatcaaaactgagcccacttagactcctcaccaccagtctggtcctgtcatcagacaggaggctgtc

SEQ ID NO: 2867 - DNA, 451 bp, homo sapiens
  misc_feature (252)..(427): n=unknown
gtattggattcacatattctaaaaatgctcgtcatttgtggctaattttatcaagtctagtttaatctcatatttacagagtttagttaattctaattagctttgttggaggtcataaaccacattattaaccttgaaccgactctgtgtttacttgagttcctctgcataatagcatgtcaccaccatcataaacatgttggtattgcattatgcttctagaggagacatccaccaatatttgaaaatctnnnnnnnnnnnnnnnnnnnnnnnnnnnnnnnnnnnnnnnnnnnnnnnnnnnnnnnnnnnnnnnnnnnnnnnnnnnnnnnnnnnnnnnnnnnngccttttaaaaaaaagaaaganaatagagaaaatcttaacttatatttacttactgtatgttgtgattagtttaatagaagggngttaatccttaataattaagttag

SEQ ID NO: 2868 - DNA, 313 bp, homo sapiens
  misc_feature (16)..(189): n=unknown
  misc_feature (295)..(295): n=unknown
agaaggctgaggaggngcgggacgaggaagaggacaaacngnggaagggggaagaagtcacgcccatctcggccatccggcacgagggaaagactgacagtnagcgcacggacaccgcagccgacggggagaccaccgccactgaggagctagaaaaaactcaagatgacctgatgaaacntcnaaccnacattagcgagctgaaaagaaccttcttagaaacctcaacagacactgccgtaacgaatgaatgggagaagaggtttccacctcccccgtgcgactggccgccagnaggaggatgcccccatga

SEQ ID NO: 2869 - DNA, 524 bp, homo sapiens
acattcaccatggggctgtgatgcaggtgatcgtgtaatggagaatctctctttttgaaggctatttataactaacactaaatagttttaattacagtggaaattctgtacagtttaaggcttggctctgaactagaatgtaaatatggaccagatttgaaaataaaacactttcttttcaagtaaaagaagaaaaatcaattaaaaaatacacggcacggaaaaagtaactaagaaaacaaagccacaggaagcccagcagtttctcctgaagtgaaatttcataatattgtaaactaacaaaaatacaggttttcttcccaaaataatgacaatttaagctctctggattgaacacagaccaaagcaaacaacaaggaagaaatcgcattaatatgctaaaatcagtactaccttataacaaattaaatgagatacacaaagcaagattgggaagcctttacatattttcccagagggtcagagagtcattactggttatggggtggagagtaattaaaacc

SEQ ID NO: 2870 - DNA, 470 bp, homo sapiens
  misc_feature (114)..(114): n=unknown
  misc_feature (391)..(391): n=unknown
atttacatatggtaaatgatgaactttaaaaatgtgtccaggtgttagatgagttcattagactcttttaatgctaatggctagtacgtttaaacaaaacagcagttcttcctngctgcaatattcccattgaccacttaaatgaccataagtggtcatttaagaacatgttagggttagccctgatctgaatataaaagtgagaaaagggctacagtgcatttcttggtaacttaaactgagtcttgaagttataatgatccattcgagttctgtgatccttattgttcttaattgtgtttctctacgtattgttacagatgagccatacgtttctttgtatcaatgtagacatgacttcagatactctgaggactacccagcagtctangaccctggggccaagtgctgggactatgggactaaatccagtagatgggctgtgtagcaactctcccaggggacacact

SEQ ID NO: 2871 - DNA, 444 bp, homo sapiens
  misc_feature (123)..(123): n=unknown
  misc_feature (289)..(439): n=unknown
tcaacaccactcaatgatctaacagcttcctaaatccaacttcattctttttgcagtttaagcccagtttcaaataaggcatcactgggatggataaagaaaacactgagatgggggataganacattaaaaagcagaaaaactaagcaaaatctaaatcctgtcaattggatgtttaccatttcacactgaaatctttccctgaatagaccagggacatcactgcctcctgctcagatctcaaagcttcaacatgctccacaaagcacctccctaagtaccctagtgngttcccngggagagttgctacacagcccatctactggatntagtaccatagtcccngcacttggccccagggtcctngactgctgggtaggtcctcagnggtatctgaagtcangtctacattgntacaaagaaacgtatgggctcatcngtaac

SEQ ID NO: 2872 - DNA, 441 bp, homo sapiens
  misc_feature (382)..(382): n=unknown
caggcagttgtagccggggtccgtgttctcacaccggtgctctccattgtggttgaagcaggcatcaggcacttctttgcactatggaggaaataagagcgtgcatcatgtttagaagtcactgccataaggaagcgactgcacaggttagctgctttcctagatccagaaactcggagccccatcagttcctcacctcatcaacatctgtgcactggatgccatttccactgtaaccagggggacaagcaccacatttccagctgccatcagggtagctagtacacttcacgccggcaaagcagggattggacaggcatccatctgagacaaggagagagagacagtcacagtaaatggttggtctaagctgccatactgnccatgctgggcattaacacagtgtaagatattatagggtatagggaaccgataacttgt

SEQ ID NO: 2873 - DNA, 429 bp, homo sapiens
  misc_feature (245)..(245): n=unknown
  misc_feature (389)..(389): n=unknown
gcctgccagacttcaacgccggcgccatggagaactggggactggtgacctaccgggagaactccctgctgttcgaccccctgtcctcctccagcagcaacaaggagcgggtggtcactgtgattgctcatgagctggcccaccagtggttcgggaacctggtgaccatagagtggtggaatgacctgtggctgaacgagggcttcgcctcctacgtggagtacctgggtgctgactatgcgganccacctggaacttgaaagacctcatggtgctgaatgatgtgtaccgcgtgatggcagtggatgcactggcctcctcccaaccgctgtccacaaccgcctcggagatcaacacgccggccccagatcagtgagctgtttgacgcnatctcctaacagcaaaggcgcctcagtctcaggatgtctc

SEQ ID NO: 2874 - DNA, 556 bp, homo sapiens
caatttcattgttgttagcatatctatttctccatacattgtaaaactgtaatccttaggtatttctaaaacataaagaggagaattaagtcagctgcagaacaatggggctgattcttctgctttttctctggaaaatctttcattgcttttggtggaaatttacctagaggttacaaccacaggatgtagcttggtctcttatttgcctttttgggaaaccaattaagattaatacaggataaaggaaaaaagcaatctattcattatataacacagttgtttgtattacttgttccctgcaaaggaaatctgttgaatgcttgcattttgaattcttttctaatagaacaaccaaaaaaggcttcttatggtgcagcaggaaaaaagatcatttttatagctttgcatcttaacatagcatttaaagagcggcatgaattagaggaaagacatggaacacacaggtagtcggtttgagatccatcggcttaaaagtatcctagggatgggaatgacccagaagtattttccagttgtctagtgggtgtggtat

SEQ ID NO: 2875 - DNA, 476 bp, homo sapiens
tatgtgataattctcagctgtcctacaatgcctgcttcttgaaagaagtcggcactttctagaatagctaaataacctgggcttattttaaagaactatttgtagctcagattggttttcctatggctaaaataagtgcttcttgtgaaaattaaataaaacagttaattcaaagccttgatatatgttaccactaacaatcatactaaatatattttgaagtacaaagtttgacatgctctagaatgacaacccaaatgtgtcttacaaaacacgttcctaacaaggtatgctttacactaccaatgcagaaactgtgttgttttcctctctaaaaaaccagggatgtgtccaaaatgataaattattcctaagattaaagtgggcaatggctccagatttccccatcttaccagttctggggattcactctggccctcctagaagactgagggggaatatgcggtacttacatg

SEQ ID NO: 2876 - DNA, 509 bp, homo sapiens
  misc_feature (462)..(500): n=unknown
caggcatgagccaccgcgcctggctggccaaagcttcttgcagccctgcctgggtcagctgtcacctcctgcagagactgacccaaccccttctcctgccagggtctgactgcgtaccatgatatctccctggacaagtgctatgtcatcgaactcaacaccaccattgtgctgccccctcgcaacttctgggagctcctcatgaacgtgaagagggggacctacctgccgcagacgtacatcatccaggaggagatggtggtcacggagcatgtcagtgacaaggaggccctggggtccttcatctaccacctgtgcaacgggaaagacacctaccggctccggcgccgggcaacgcggaggcgtgagtggctggcttcacccacagtagcccctgtcccgtgcccagaccacagttatttcacgcctagcccagtgtcagagagtcagatagcagcagantaacagctagcattagcagagacttccgtgtgccgggnatgctgtgt

SEQ ID NO: 2877 - DNA, 355 bp, homo sapiens
  misc_feature (48)..(48): n=unknown
  misc_feature (187)..(342): n=unknown
gagctgctcagttaggacccagagggaaccatggaaaccccagcgcanttctcttcctcctgctactctggctcccagatgtctccgaggaggtgaagttgacgcagtctccagcctctctgtccttctctctaggggagagagccaccctgtcctgtcaagccagtgaaaatcttaagcgcgtctnnnnagnctggnatcannagangnntgnccaggctccnatactggtnctctttgcaangtcnaccagggcngnaggntcccagacangttcaatggnagtnggtctgggacagacttcactctnaacatcganagantgnagcntnaagatttngngatttacttctgt

SEQ ID NO: 2878 - DNA, 573 bp, homo sapiens
  misc_feature (13)..(112): n=unknown
ttaaagccaaggnngaggaggggggtgaggtgaaagatgagctggaggaccgcaataggggtaggtcccctgtggaaaaagggtcagangccaaaggatgggaggngntcangctggaactgaggagcaggtgggggcacttctccctctaacactctcccctgttgaagctctttgtgacgggcgagctcaggccctgatgggtgacttcgcaggcgtagactttgtgtttctcgtagtctgctttgctcagcgtcagggtgctgctgaggctgtaggtgctgtccttgctgtcctgctctgtgacactctcctgggagttacccgattggagggcgttatccaccttccactgtactttggcctctctgggatagaagttattcagcaggcacacaacagaggcagttccagatttcaactgctcatcagatggcgggaagatgaagacagatggtgcagccacagttcgtttgatctccaacttggttccctggccaaaaatgaaaagaggtgaacgaccataatattgacagaagtaaatcgcaaaatcttcaggctgcagtctgtcga

SEQ ID NO: 2879 - DNA, 244 bp, homo sapiens
  misc_feature (19)..(234): n=unknown
gcattttagtaaaatctgngnttgtacagtttttantntnatttccanaganacccagcaggnagnctnttttctcttaganaaatcnaacntgcaagccgtgaagtcaggnatagctgaaccccttggataagcacacgctttgggcttctttaaagcgagcctnttnntcaagngcntttcctttgctggnatgaggggagggntgtgcctgncagggctagcacctggganggacgctgac

SEQ ID NO: 2880 - DNA, 259 bp, homo sapiens
aaccagtgtcagcccaagactaccccgtcggtcattctgttcctgccgtcctgtgaggagcccaagccaacaaggccacactggtgtgtctcatgaataactttatccgggaatcttgatggtgacctggaaggcagatggtaccctcatcacccagagcgtggagaagaccacgccctccaaacagagcaacagcaagtacatggccagcagtacctgagcctgacgcccgagcagtggaggtccgcagaagtacagt

SEQ ID NO: 2881 - DNA, 407 bp, homo sapiens
  misc_feature (33)..(387): n=unknown
tgggatgcagagagagacccctcccctgggatnctgcagntccaggnacnngtnggtggngtnngggctggnaccnatgaacattctgcaggggccactgantnctccacggngctcacttcttgacataacctggcagctgtagcttctgcgggacctccactgctcgggcgtnaggctcaggtagctggctggccatntacttgctgtngctntgnttggagggcgtggtcttctcnacgctctgggtgatgagggtacatntgccttccaggtnancatcaagattnccggataaagntattcatgagacacaccagtgtngccttgttggcttggggctactcacangacggcagnaacagaatgaccganngggtagtcttnggctgacactggttctcgag

SEQ ID NO: 2882 - DNA, 435 bp, homo sapiens
  misc_feature (388)..(413): n=unknown
agaacccagcattgcagcagctccaccatggcctgggctcctctgctcctcaccctcctcagtctcctcacagggtccctctcccagcctgtactgactcagccaccttctgcatcagcctccctgggagcctcggtcacactcacctgcaccctgagcagcggcttcgataattataaagtggactggttccagcagagaccagggaagggcccccggtttgtgatgcgagtgggcactggtgggattgtgggatcaaggggggatggcatccctgatcgcttctcagtcttgggctcaggcctgtatcggtacctgaccatcaagaacatccaggaagaggatgagagtgactactactgtgggacagaccatggcagagggagcnacttcgtggtattcggcggaaggancaagctgaccgtcctaggtcag

SEQ ID NO: 2883 - DNA, 499 bp, homo sapiens
gcagggagaagggcttgatgccttggggtgggaggagagacccctcccctgggatcctgcagctctagtctcccgtggtggggggtgagggttgagaacctatgaacattctgtaggggccactgtcttctccacggtgctcccttcatgcgtgacctggcagctgtagcttctgtgggacttccactgctcaggcgtcaggctcagatagctgctggccgcgtacttgttgttgctttgtttggagggtgtggtggtctccactcccgccttgacggggctgctatctgccttccaggccactgtcacggctcccgggtagaagtcacttatgagacacaccagtgtggccttgttggcttgaagctcctcagaggagggcgggaacagagtgaccgagggggcagccttgggctgacctaggacggtcagcttggtccctccgccgaataccacgaattgctccctctgccatggtctgtcccacagtagtagtcac

SEQ ID NO: 2884 - DNA, 476 bp, homo sapiens
gcccagccaagcactgtcaggaatcctgtgaagcagctccagctatgtgtgaagaagaggacagcactgccttggtgtgtgacaatggctctgggctctgtaaggccggctttgctggggacgatgctcccagggctgttttcccatccattgtgggacgtcccagacatcagggggtgatggtgggaatgggacaaaaagacagctacgtgggtgacgaagcacagagcaaaagaggaatcctgaccctgaagtacccgatagaacatggcatcatcaccaactgggacgacatggaaaagatctggcaccactctttctacaatgagcttcgtgttgcccctgaagagcatcccaccctgctcacggaggcacccctgaaccccaaggccaaccgggagaaaatgactcaaattatgtttgagacttttcaatgtcccagccatgtatgtggctatccaggcggtgctgtctct

SEQ ID NO: 2885 - DNA, 341 bp, homo sapiens
  misc_feature (285)..(285): n=unknown
taacgagtcagagctttggctaggaatgatttggaaaagaactgaaggcataattccacaggacattcacagttgtgtgctagagacagagaggagcaggaaagtgttttagaagcatttgcggtggacaatggaaggcccggcttcatcgtattcctgtttgctgatccacatctgctggaaggtggacagagaggccaggatggagccaccgatccagacagagtatttgcgctccggaggggcaatgatcttgatcttcatggtgctgggtgctagggccgngatctccttctgcattcggtcggcaatgccagggtacatagtggtgccccctgata

SEQ ID NO: 2886 - DNA, 360 bp, homo sapiens
gcctgcgcagggcaggagcagctggcccactggcggcccgcaacactccgtctcaccctctgggcccactgcatctagaggagggccgtctgtgaggccactacccctccagcaactgggaggtgggactgtcagaagctggcccagggtggtggtcagctgggtcagggacctacggcacctgctggaccacctcgccttctccatcgaagcagggaagtgggagcctcgagccctcgggtggaagctgaccccaagccacccttcacctggacaggatgagagtgtcaggtgtgcttcgcctcctggccctcatctttgccatagtcacgacatggatgtttattcgaagctacatga

SEQ ID NO: 2887 - DNA, 297 bp, homo sapiens
  misc_feature (194)..(281): n=unknown
ggcagtttgtccttcctcaggaccagccgtcagcagtccctgacgaaagcaccccattctctccacagacagctggttccagaaggaccctctgaggctggtcttccgggtaggatgtgctgtgggagggttctgtttccgaggaggagaggcgcgacacagcgtgcaaggacctgcagcaccttccacgcagnnnnnnnnnnnnnnnnnnnnnnnnncctgccgggctctgactcctaagtcaggcaggagcttcttcaggcccctggctnaggaagagncacagccaccctaaaa

SEQ ID NO: 2888 - DNA, 631 bp, homo sapiens
  misc_feature (427)..(427): n=unknown
  misc_feature (602)..(602): n=unknown
ggtgggaccacagatacagccaccatcttgtccaaccagcacgagaaggacagcggtgtggggcggaccgacgagagcacccgtaatgacgagagctcggagcaagagaacaatggcgacgacgccaccgcatcctccaacccgctggcggggcagaggaagctcacctgcagccaggacaccttgggcagcggcgacctgcccttcagcaacgagtctttcatttcggccgactgcacggacgccgactacctggggatcccggtggacgagtgcgagcgcttccgcgagctcctggagctcaagtgccaggtgaagagcgccaccccttacggcctgtactaccctagcggccccctggacgccggcaagagtgaccctgagagcgtggacaaggagctggagctgctgaacgaagagtgcgcanattcgagctggagtgcctgagcatcgtgcgcgcccacaagatgcagcagtcaaggagcagtaccgcgagtcctggatgtgcacaacagcggcttccgcaactacaacaccagcattcgacgtgcgcagacacgagctcttcagatattcaccgagctcccggagaaattccgacnaaggacagcttcgagcggcttacaacaca

SEQ ID NO: 2889 - DNA, 524 bp, homo sapiens
  misc_feature (253)..(253): n=unknown
  misc_feature (443)..(508): n=unknown
ttgtaactaatcatgattttgtgaacttgcctgtataagtctgtaccttcaaatctacaaagcaaaagtttactacaatgagcacttaaaattccacaaaccgtctccatccacaactttcctgtacatgcaaattctttcaatgggctgcaatatttgcaaacatgctttaaacttccataaagatgcaagatattttgctttctgctaaaacctttacactctcttgggaaccttaaccaggaaaatgttnaaatgtatatcccaactctaaacgctgccggtttggttatatgtattaaatcgttaaccaccgggttgggtggttttgagttgaaaccttcacctaaatgataatatcttaacggtcacgcatatgaaacacattcagtaacgtaccattataaaatagggttccattaaaaatacatactggcagttgnntttgtgttttaggcaggaaaaaaagcgggtttaacttttttatntgagnatagtttaaacaagntattctgtgaaagtat

SEQ ID NO: 2890 - DNA, 464 bp, homo sapiens
cagtgaataatcagaagtcagtttgggagaagtcaaaatggacacaatcttcttgtggagtcttctattgctgttttttggaagtcaagcctcaagatgctcagctcaaaaaaataccgaatttgcagtggatctttatcaagaggtttccttatctcataaggacaacattatattttcaccccttggaataactttggttcttgagatggtacaactgggagccaaaggaaaagcacagcagcagataagacaaactttaaaacaacaggaaacctcagctggggaagaattttttgtactgaagtcatttttctctgccatctcagagaaaaaacaagaatttacatttaatcttgccaatgccctctaccttcaagaaggattcactgtgaaagaacagtatctccatggcaacaaggaattttttcagagtgctataaaactggtggattttcaagatg

SEQ ID NO: 2891 - DNA, 393 bp, homo sapiens
  misc_feature (19)..(391): n=unknown
gatatctattactacaggnacagtttaaaacagaaaanacataagagatagagccanatattcctcangatgacgntantttgccaatcagctatttttgagaaatcatcttttattctgaggctgtgcttttcattcacagtnaatctaaatctcttccttttatctcctgggtgtcaggatttgtcactcntcccataaacagaattgatnctgttggattatgcttcatantaaacagaaatggatgatttgctataaatnggctttgngccagactcatgatcacagggatgtgtntgccagttgatgttgcngcttcactaccatcttcatntatctcaaagnaaactttttgcgtcacttgggnaacatncacntcagatggaanct

SEQ ID NO: 2892 - DNA, 376 bp, homo sapiens
  misc_feature (283)..(333): n=unknown
catcagtcaaggtcaattcagccctggccatgaagcaagctcttcctccccggccagtgaatgctgcctcacctacgaatgtgcaggcttcgtcagtgtactcggtaccagcctatacctctcctccttccttctttgcagaggcctcctcaccagtcagtgcatccccagtgcctgtgggcattcccacctcgccaaagcaagaatcagcctcatcatcttattttgtggcaccaaggccaaagttctcagccaagaaaagtggtgtcacaattcaggtgtngaaaccatctgttgtggaagagtaatcttgtagctgaagctgagtgtccntttgcttgaaatgaaatggttgcagtgtttcttgagtccctga

SEQ ID NO: 2893 - DNA, 504 bp, homo sapiens
  misc_feature (428)..(429): n=unknown
ggaaaaaccaccaaccaaggccaaggagaccagagcccagcacctcacccagaggaccccagtcagaggccccatctcagacccgaggctagcatgggctgcaggctgctctgctgtgcggttctctgtctcctgggagcggtccccatggaaacgggagttacgcagacaccaagacacctggtcatgggaatgacaaataagaagtctttgaaatgtgaacaacatctgggtcataacgctatgtattggtacaagcaaagtgctaagaagccactggagctcatgtttgtctacagtcttgaagaacgggttgaaaacaacagtgtgccaagtcgcttctcacctgaatgccccaacagctctcacttattccttcacctacacaccctgcagccagaagactcggccctgtatctctgcgccannccaagtacatccgggatagcgggaggatttaaatgagcagttcttcgggccaaggacacggctcaccgtgcttag

SEQ ID NO: 2894 - DNA, 439 bp, homo sapiens
  misc_feature (251)..(267): n=unknown
  misc_feature (434)..(434): n=unknown
ttgggggttgggagctcaatcttcagggaaacagaaaaaagagagaagtattcatgtaagtaggagatgagaagcagagtgagaatcacttttaggaacacagattgggagcaggtacaggagaatcctgggtgaggatgaagaatgacctgggatggttttggagctagcctctggaatcctttctcttgaccatggccatcagcacgagggcactgaccagcacggcatacaaggtggccttccctagnaagntctcntagaggntggtggcagacaggaccccttgctggtaagactcggaggtgaagccacagtctgctctaccccaggcctcggcgctgacgatctgggtgacaggtttggccctatcctgggtccactcgtcattctccgagagcccgtagaactggacttgacagcggaagtggttncgggg

SEQ ID NO: 2895 - DNA, 277 bp, homo sapiens
gaggcttcagactacgctgcccccgtgacaggcagattcaccatctcaagagataactcaagagacacagtgtatcttcaaatgaacaacctgaaaagcgaggacacaggcatctattactgtgtcacagactgggggactggagaatattacattagagcctttgatttgtggggccgagggacaatggtcaccgtctcttcagcatccccgaccagcccccaaggtcttcccgctgagcctctgcagcacccagcccagatggggaagtggtcat

SEQ ID NO: 2896 - DNA, 396 bp, homo sapiens
  misc_feature (222)..(222): n=unknown
  misc_feature (357)..(389): n=unknown
ggcgggcggctcagtagcaggtgccgtccacctccgccatgacaacagacacattgacatgggtgggtttacccgccaagcggtcgatggtcttctgtgtgaaggccagcggcagggcctcgtggcccaccatgcaggagaaggtgtcccccttcttccagtcctcggctgccacgcgcagtatgctggtcacagcgaaggtggtggtgccctggctgggcncctgccgggatgcccaagtcaggtacttctcgcggggcagctcctgtgacccctgcagccagcgaaccagcacgtccttggggctgaagccgcgtgccaggcacgtcagcgtcaccagctcgttcagggccagcnnctccgacggcggctggcagcaggtggaccnngggccgg

SEQ ID NO: 2897 - DNA, 367 bp, homo sapiens
  misc_feature (93)..(363): n=unknown
gccatgtttgccagctacgtccctgaaatcatagagttaataggaaaccgcaagaaatacgggggctcctatagtgcggttagtggaagaaancacattgtggtctgcggacacatcactctggagagtgtttccaacttcctganggactttctgcanaaggaccggnntgacgtcaatgtggagatcgtttttcttcacancatctcccccaacctggancttnaagctctgttcaaacgacattttactcnggtggaattttatcagggntcngncctcaatccacatgatnttgcaagagtcaagatagngncagccgatgcatgcctgatncttgccaacaagtatgcgctgncccgnatgc

SEQ ID NO: 2898 - DNA, 72 bp, homo sapiens
  misc_feature (31)..(66): n=unknown
taggggctatcatttttaaagacttgatttnntctatngtggtaaaatatatanatanatatttgncatttt

SEQ ID NO: 2899 - DNA, 329 bp, homo sapiens
tttaaatgttttgttttccaaatttgaaggaatatttttcttttaagctatctatagcttacagaaacttggtaaaatacaacttgtgaacaaaaattgaaacattaatttttctccctacattttccatccagaatcaggcaactattcatgggtgttcacattgttatgaaaatagttatttgcataagttcaataagaatctgctctgtttataacaggatacatttaaaaatactggttatattaccaaggctttggctgggatgtcatatttggaaatatacatagaatgaacccgtagttactgaggtactgcaggcaaagtc

SEQ ID NO: 2900 - DNA, 208 bp, homo sapiens
  misc_feature (191)..(196): n=unknown
cagtttccattctgcaaaatatagtgatagctcctactgggcaatacaacagtagaacagtgggttttgtaaaatgggaatccaggaacagaagaatataaataaattgatttaaataaactgattggttaatttcagaatacttcatattacttttttctaagagttaaagcagaaaggactttcttacngngcngacgcagacagc

SEQ ID NO: 2901 - DNA, 419 bp, homo sapiens
  misc_feature (386)..(386): n=unknown
gacaaatagtgattctaacttacattaccagaagttagctgaaaggtctatgaatgacaaggctatgtgtgaaattgggatggaggggcagacatcaatccattcttggaagcaaatatgacactgtgtgtcaggaatcctgaaatataagtctctatatctcccagaggatacttcacacatcatcaccaaagataccagataaaacctctgaaaagcacagacgagaaagaacatgccgtctttacatctaaccaggaggaacaagacccagctaaccacacatgtggtgtgaagagcactgacgggaaacaaggcccaattcgaatctctagatcactcaaaagcccagaggtgaatacaattcccttacctcatcatttacntcaattgtctcagcaaagataggcaatatacta

SEQ ID NO: 2902 - DNA, 490 bp, homo sapiens
  misc_feature (65)..(65): n=unknown
ggcagggcgacgtaggcggcacgtgcggggtcgtggacgacgagccccggccgactgggaaagcngagaccgaagacgaggacgaagggactgagggcgaggacgaagggcctcagtggtcgccgcaggacccggcactgcaaggcgtaggacagcccacaggaactggaagcataagaaagaagcgatttgtgtccagtcaccgctatgtggaaaccatgcttgtggcagaccagtcgatggcagaattccacggcagtggttctaaagcattaccttctcacgttgttttcggtggcagccagattgtacaaacaccccagcattcgtaattcagttagcctggtggtggtgaagatcttggtcatccacgatgaacagaaggggccggaagtgacctccaatgctgccctcactctgcggaacttttgcaactgggcagaagcagcacaacccacccagtgaccgggatgcagagcactatgacaca

SEQ ID NO: 2903 - DNA, 524 bp, homo sapiens
  misc_feature (461)..(515): n=unknown
tctattttatatgcacttccacaaaagcgatataatttaaaagtttttttcattagaaataaatgtataaaaataaatatgttattataggcatttattactaactatagtccttcttggaaggaacacccaaaccaatacttataaagtacatgtaatttatagtaacatattttactatatacatatggaaaaaatcatattctcacagaagagctgaacagacattcaccaggatacgactgttggacaagctgctggagatggacctgctacccctcagcagcctccccaccacaagacaagtgatctcaatgtccccaaacctgtgggaccctgttctacacacctcatttttgttccggcgtttcatcctccttgtgtgattgtactgattttcatgagacacaagttacttctttacatccatattccccaaagcaggggtacatggtaggganagaaaggaagttgggagggtactaaggctcattgtgtctcctctaggcttttanccagcatct

SEQ ID NO: 2904 - DNA, 433 bp, homo sapiens
  misc_feature (13)..(108): n=unknown
  misc_feature (214)..(214): n=unknown
  misc_feature (349)..(398): n=unknown
aaggatgtgagtntgttctccaatcccgccagacggagaaggcttctataatgtttgcacaacatgttgattctatagttgaattctgtacagaacaaaaccacaacnaagaagctccaaacaagcaaaatcaaaaatgcaatctccgaagcacatgggaagtgatccgtgattctgaggactttaagaaaaccactcctatgacaacacagcnaccaaatcccaccttctcattgctgcagattggacaaagaattgtgtgtttagtccttgacaaatctggaagcatggcgactggtaaccgcctcaatcgactgaatcaagcaggccagcttttcctgctgcaganagttgagctggggtcctgggttgggatggtgacatttgacagtnctgcncatgtaccaaagtgaactcatacagataaaacagt

SEQ ID NO: 2905 - DNA, 303 bp, homo sapiens
  misc_feature (26)..(279): n=unknown
gaaatcacagggagatgtacagcaanggggccatttaagagttctgtgttcatcttgattcttcaccttctagaaggggccctgagtaattcactcantcagcngaacaacaatggctatgaaggcattgtcgttgcaatcgaccncaatgtgccagaagatgaaacactcattacaaccaaataaaggacatggtgacccaggcatctcngtatctgtttgaagctacaggaaagcgattttatttcaaacaatgttgncattttgattcctgaaacntggaagacaaaggctgactatgtg

SEQ ID NO: 2906 - DNA, 446 bp, homo sapiens
  misc_feature (243)..(243): n=unknown
  misc_feature (358)..(361): n=unknown
tattgacagctgcagttctcctatccacttccacataatttttaaaatgtgaatgccaggaatggtgctgttgatatgaatattaggacaaggagcagacgtttcatcaggactaggtgtctctggcggagtctgtggaggaataaacaaagatactcgtgcaatgttggatatttctgatttcagatcgaccttatcaacagcctgaatagcaatgaaaagatctgtgccattttcaaaagnaatgttttctggtttaaacaaaaagacttcctcagagttggcttcctttgggatgagagcagtagtattcacttgaagagattcattgaacttgtctctgagatcaagaatactnccncttattcgaatgatatacttgtgagctgttccatggtcataatcatccccaggagctgtccaagtcagattaatgagactgcccc

SEQ ID NO: 2907 - DNA, 73 bp, homo sapiens
gcctcattgatgcttttggggccctttcatcaggaaatggagctgtctctcagcgctccatccagcttgagag

SEQ ID NO: 2908 - DNA, 552 bp, homo sapiens
  misc_feature (530)..(530): n=unknown
cagcatccacccgatcttcattcactgtccaagaccttaaaccttttacagaatatgtgtttaggattcgctgtatgaaggaagatggtaagggatactggagtgactggagtgaagaagcaagtgggatcacctatgaagatagaccatctaaagcaccaagtttctggtataaaatagatccatcccatactcaaggctacagaactgtacaactcgtgtggaagacattgcctccttttgaagccaatggaaaaatcttggattatgaagtgactctcacaagatggaaatcacatttacaaaattacacagttaatgccacaaaactgacagtaaatctcacaaatgatcgctatctagcaaccctaacagtaagaaatcttgttggcaaatcagatgcagctgttttaactatccctgcctgtgactttcaagctactcaccctgtaatgggatcttaaagcattccccaaagataacatgctttgggtgggaatgggactactccaaggggaatctgtaaaganatatatacttgagtggtgtgtg

SEQ ID NO: 2909 - DNA, 562 bp, homo sapiens
  misc_feature (6)..(6): n=unknown
  misc_feature (546)..(553): n=unknown
cagatnttctggaaaaggctttttgtcgatttgcttctatttccacaacacttacatcagtgaaattgccatctgaatacatttgatcttttgaattaaaattgtgccttggaggagtgtgaggtgaccactgggcaatatgactctttgaaggatctggaacattaggccagatgtgttttttaattaggtctcgcttattaaagcagaacagcactcccagaagagttgtcaataggaatgctaagcaaacaggcacgactatggcttcaatttctccttgagcaaactttggggtagtaaaagtgaattctggaccatccttcccaccttcatctgtgtatgctgccattcgtaccatgtacaatgtgtcactagtcaaagaggacaatgtatattctgtgtgggaagaatccacattcacagcagtttcatttccaatgatggtctataaaatatagtataattctgataaatccattctgaacatcaacaggaagttggtcccatctaagacagttcgttttccctactttttttgtccgnacagtangtcctttgg

SEQ ID NO: 2910 - DNA, 289 bp, homo sapiens
  misc_feature (62)..(135): n=unknown
caggattgcccgggcccaagggcgatgatgggaagctgggggccacaggaccaatgggcatncgtgggttcaaaggtgaccgaggcccaaaaggagagaaaggagagaaaggagacagagctggggatgccagtngcgtggaggccccgatgatgatccgcctggtgaatggctcaggtccgcacgagggccgcgtggaagtgtaccacgaccggcgctggggcaccgtgtgtgacgacggctgggacaagaaggacggagacgtggtgtgccgcatgctcggcttccg

SEQ ID NO: 2911 - DNA, 453 bp, homo sapiens
  misc_feature (10)..(428): n=unknown
agtaaaaacngctatgtttatatatgcatacatatatgggctctggcaagggatgcatgagtncatgcgtgttatgtaaacatagcaattggtcagaaagagagtttctcatcattaggncatttaaggagtggcaagcatattggaagcaagantgacntaggncnatatnggcttagttntcanccagnngtgttgctgttcctacacctgagagnggcccaggtctctccccaagcangntagtgctcacctgatatgacaggngatcgtgtatcnnaggcctatgantntgngatnnncccaaggtgangtgggtctgcactcacttgctaccangtagctcccctagttctngnacacgtntatggcccagttctgctcctcatgtaaaaagcataacacgatctccctgtctcnangnnganggtgcagattgcagatttatggaag

SEQ ID NO: 2912 - DNA, 453 bp, homo sapiens
  misc_feature (155)..(157): n=unknown
  misc_feature (375)..(414): n=unknown
caacagacaagtgtgcattgacccgaagctaaagtggattcaggagtacctggagaaagctttaaacaagtaagcacaacagccaaaaaggactttccgctagacccactcgaggaaaactaaaaccttgtgagagatgaaagggcaaagacgtnnnggagagggggccttaaccatgaggaccaggtgtgtgtgtggggtgggcacattgatctgggatcgggcctgaggtttgccagcatttagaccctgcatttatagcatacggtatgatattgcagcttatattcatccatgccctgtacctgtgcacgttggaacttttattactggggttttctaagaaagaaattgtattatccaccagcaatttcnagcagttagttccttccatgatccatccacnatccatcnatccattctccattccccattttttaaatccacgagtac

SEQ ID NO: 2913 - DNA, 612 bp, homo sapiens
  misc_feature (442)..(462): n=unknown
acatttgatacaattttagtacaagtgaaaaaatacactgtggctaacattgaaaagctgcaatcacatttatatatcatatatatttctttacaaattgccagtagtttgagataatagagaagtataaactactgacattcatatggctccacttcaaatatatgaattgttcgactataaatatattttgaaatacatttgttttctaaagaaacgtaaaaaaaaatgtgcacaaaaatatatataaaaaaatgccttgcaaaaagttacaaataccaccaggaccttctgtggatcgcatttatgcatggaaatgtcaccttgccaacagttctgattggaacctgaaaccctgctgtggcttcaggagggggtagtggcaagatgatggtttattcactgattttttcgcttctgatttcggaaacctcagagtttntttnntnttttttttnntgngcatacataggcttcagaggcaatcacaaaacccagtcactcaaagcgagctctcagatttaaaattgcatttgattctgtaaagacttgtcttttgcgggtaagcagggggaccattacacatccccaggagagggccagctccattct

SEQ ID NO: 2914 - DNA, 338 bp, homo sapiens
gtcattggtcgctacccacaggagaacaagggaacctacatcccagtgcctatagtctcagagttacaaagtggaaagtggggggccaagattgtcatgagagaggacaggtctgtgcggctgtccatccagtcttcccccaaatgtattgtggggaaattccgcatgtatgttgctgtctggactccctatggcgtacttcgaaccagtcgaaacccagaaacagacacgtacattctcttcaatccttggtgtgaagatgatgctgtgtatctggacaatgagaaagaaagagaagagtatgtcctgaatgacatcggggtaattttttatggaga

SEQ ID NO: 2915 - DNA, 523 bp, homo sapiens
gtccctaggagataagagtatcttgcacagcaggtgcaggtttcccagcagctcaggcaagagtccgatgtttgtgccatctgatcctgatgtctggagagatagccatgtgtgagcctgaatttggcaatgacaaggccagggagccgagcgtgggtggcaggtggcgagtgtcctggtacgaacggtttgtgcagccatgtctggtcgaactgctgggctctgctctcttcatcttcatcgggtgcctgtcggtcattgagaatgggacggacactgggctgctgcagccggccctggcccacgggctggctttggggctcgtgattgccacgctggggaatatcagtggtggacattcaaccctgcggtgtccctggcagccatgctgatcggaggctcaactggtgatgctcctcccgtactgggtctcacagctgctcggggggatgctcggggctgccttggccaaagcggtgagtcctgaagaagagttctggaatgcatctggggcggctttgtg

SEQ ID NO: 2916 - DNA, 399 bp, homo sapiens
ttgtcagcttgagaagcaaggaagtggccaggcccccaacaaagcaatcaagcaagaaatggggtgcgggaaatgagctgatgtgcagaaacagcctccttgtccaactcggggacattcctctcaagaaacacgctcgtgttgtggtgtttgcactgctctctgggcagtgcgggcagcgtgttccccaggctggggtctctgatgagcacaaaggaattccaagaacctagagcctcctcagcagtcagtctatctgagaaagcaggcccaagcagtggaagcagggggtcgctcctctgggcctctgccctggcaggaaatgcaggaactcccctgtcctcagtctgggacaggtgagctgaggacacctggagcagcaggaatcccacgagctct

SEQ ID NO: 2917 - DNA, 509 bp, homo sapiens
  misc_feature (504)..(504): n=unknown
cttccatgtcttcagtggaccaagatattacgcatttgatcttattgctcagagagttaccagagttgcaagaggcaataaatggcttaactgtagatatggctgaagcaaaatcaaatgtggctgtatccactttcagaatgttgaagggaagttcagcatgcattttcgttacattgtgtcctgcttatacttttctcaatattaagtcattgtttcccatcactgtatccattctacctgtcctccgtgaaaatatgtttggaatattccactatttgcagaggcttattcagttcttacacattccatcttacattagtgattccatcaaagagaaggaaagtaagcctttttgtcacctcaatatttactatttcaatacttacatatctgacttctaggatttattgttatattacttgccatctgacttcatacatccctcagtttcttaaaatgtccatggatatcttctacatgcaatttagaactagatttggntagaa

SEQ ID NO: 2918 - DNA, 440 bp, homo sapiens
tctaataacagcaaatataacattataatgattttgatatctggactcgctagacttggtcccataaatcctatagttcttaacaaaaaaacccatccgttagcaaacttacacatctaagctcagtttaatgcaacttaatgagacattgaattttatgcagctaacccaagttatctatagtgtgtgccctcctgagtaccccaggaaatagaagtaaagaactgacgaacatcagatccaactggcccatttgggtttggactctaggagagagcaaggaggaggcaggagaggaagtggtggttctcttttggctgctgtcctgggaagatgcccagtagtccttagcaagggttctacttctgcattctgtgttgattcattttcatatgtgtagatgtactgtgtctagtacctcatgtctagggttgctgtaa

SEQ ID NO: 2919 - DNA, 337 bp, homo sapiens
  misc_feature (279)..(335): n=unknown
gcgaggggcgccgggaactggcgtgtgggactccagacaggagaggctgcgccttccccgcaccgggaccttcgcgacacaccagatcctcgcccctggctcgcgcgaacgcacaggatgaccaccaccctcgtgtctgccaccatcttcgacttgagcgaagttttatgcaagggtaacaagatgctcaactatagtgctcccagtgcagggggttgcctgctggacagaaaggcagtgggcacccctgctggtgggggcttccctcggaggcatcantcaccctgccaagctccaagttccaccagaaccagctcctnagcaagcctcaaggntg

SEQ ID NO: 2920 - DNA, 272 bp, homo sapiens
  misc_feature (166)..(166): n=unknown
atagtaccattattttaagcaataattaagcaaattgaactactgtttttgagctctacttttcagcatatagatttacctaaaaaagtacaaaccaagcacagtggtgcaattttccaggcactttcaagttgcttatttacaaatatgtaagcaccctgttggnacacatgaaaattttggtgtcgagaagaaacactccatgtatatcaaatctttaaattttaacatttgcacagctccaaatattcctgagaaaggtcagtctcatt

SEQ ID NO: 2921 - DNA, 478 bp, homo sapiens
  misc_feature (368)..(472): n=unknown
gtcaatacaaatgctcaggcccactgggaattgaaggtggaattatatcaaaccagcaaatcacagcttcctctactcaccgagctctttttggactccaaaaatggtatccctactatgcacgtcttaataagaaggggcttataaatgcgtggacagctgcagaaaatgacagatggccgtggattcagataaatttgcaaaggaaaatgagagttactggtgtgattacccaaggagccaagaggattggaagcccagagtatataaaatcctacaaaattgcctacagtaatgatggaaagacttgggcaatgtacaaagtgaaaggcaccaatgaagacatggtgtttcgtggaaacattganaacaacactccatatgctaactctttcacacnccccataaaaagctcagtatgtnagactctatccccaagtttgtcggagacattgcactttgcgaatggaanttcttg

SEQ ID NO: 2922 - DNA, 267 bp, homo sapiens
  misc_feature (147)..(261): n=unknown
  misc_feature (471)..(471): n=unknown
gctccgtcctcctcgcctgccaccggtgcacccagtccgctcacccagcccagtccgtccggtcctcaccgcctgccggccggcccaccccccaccgcagccatggacgccatcaagaagaagatgcagatgctgaagctggacaangagaacgccatcgaccgcgccgancaggccgaagccgacaanaagcaagctnangaccgctgcaancagctggaggaggagcagcaggccctccnagaagaagctgaagggganagagga

SEQ ID NO: 2923 - DNA, 332 bp, homo sapiens
aggggataggtaaaggatgaagccagtgccagagtgggtggtgggcatgatgggggctctccctaggctgctcccagcctggctgtgcaatgttggcaatttctgctcctcctgcctgctcccctccccatagagagaatggaaaggagaggagagaagagagctgaggtggccacgctggcgtggggctcagagggaggtgatgtcattgagtgcgttgtccagttcctcgctaatggccttgtacttcatcttctgggcatagacttcatcttctaggtcatcgatggttttctccaactttgccacagacctctcggcaaactctgctc

SEQ ID NO: 2924 - DNA, 558 bp, homo sapiens
ttttggtgcgagagaaacaataggacggaaacgccgaggaacccggctgaggcggcagcagagcatcctggccagaacaagccaaggagccaagacgagagggacacacggacaaacaacagacagaagacgtactggccgctggactccgctgcctcccccatctccccgccatctgcgcccggaggatgagcccagccttcagggccatggatgtggagccccgcgccaaaggcgtccttctggagccctttgtccaccaggtcggggggcactcatgcgtgctccgcttcaatgagacaaccctgtgcaagcccctggtcccaagggaacatcagttctacgagaccctccctgctgagatgcgcaaattcactccccagtacaaaggtgtggtatctgtgcgctttgaagaagatgaagacaggaacttgtgtctaatagcatatccattgaaaggggaccatggaattgtggacattgtagataattcagactgtgaaccaaaaagtaagctcctaaggtggacaacaaacaaaaaacatcatgtcttagaaa

SEQ ID NO: 2925 - DNA, 553 bp, homo sapiens
agggaagaaagaggtatcatcatcaaatgtggaatgtcgaagaaatagttaaaataaataaagactccaagcacagctgggactggctcaggctggggctcacagaggccactgcacatcagctccaggctgcaggagccaccacctggccatactggcttcctccctgacgcagcacagctgtgcctgggacacagagtcgctctcaagtactggagcagctagcaagctcactccccactctcctcacttatctctgtgacaatgtctatcaggctctggagcccgaagatatagccagcatcctggccctcatgcaccacggtgtcctcgccatacagcctgcaggtggtgtgtgcaaagtcgatcatgcgcacatctacagagctggcgccgatgggtttgtaggcataggcaccagcagactcatcagctgattcctctgacaggtcctccaaatcctcagcatctgagtccaggaccacttcgggccgctccttgccatcataaatgaccagcagggagcttgagtagaagcggtaggactccctgt

SEQ ID NO: 2926 - DNA, 510 bp, homo sapiens
  misc_feature (471)..(471): n=unknown
cttattttatttttaagctcaaactgcttaagaataccttaattccttaaagtgaaataattttttgcaaaggggtttcctcgatttggagctttttttttcttccaccgtcatttctaactcttaaaaccaactcagttccatcatggtgatgttcaagaagatcaagtcttttgaggtggtctttaacgaccctgaaaaggtgtacggcagtggcgagaaggtggctggccgggtgatagtggaggtgtgtgaagttactcgtgtcaaagccgttaggatcctggcttgcggagtggctaaagtgctttggatgcagggatcccagcagtgcaaacagacttcggagtacctgcgctatgaagacacgcttcttctggaagaccagccaacaggtgagaatgagatggtgatcatgagacctggaaacaaatatgagtacaagttcggctttgagcttcctcaggggcntctgggaacatccttcaaaggaaaatatgggtgtgtaga

SEQ ID NO: 2927 - DNA, 581 bp, homo sapiens
  misc_feature (530)..(530): n=unknown
ttttcccaaagttttggccacaatttcccttttcatcttcctagtttgttaaattggctcttctccacatgatacgtaagttcaaggtccaaagttcctatcacaatttacaaaaagcctccaaaaaaccttgaaaagcttacgccaggaggccatttttacctgacccgaaactatcgaaaaggcctcaattttcaaggagatctgagaaaatggatgggcctgagtttttctagttatttttaaacccatccaacaaacacccctgtatcacaacatgggcgctggctgaggatgagtccgcatcctttaaggcccaggagattgcctgctgaccacctcctacattaggaagtcagaggctaaggtggacccacactccattgcagagactgttgagtctctgaaaaagtgagtgtccaggaagagagacaaaaagaaacaagtaggtaaagctgcttcttttcttccacatgctcactgcacattgttgttgaggatgcagggatccacctcagtataagtcggtngtggcatgaacttgaactcaggggctacataaagatagggctgtcttgaga

SEQ ID NO: 2928 - DNA, 358 bp, homo sapiens
  misc_feature (303)..(311): n=unknown
gaaccttgctccgagagggagtcctcgcggacgtcagccaagattccagaatgactactatcttgacttacccctttaaaaatcttcccactgcatcaaaatgggccctcagattttccataagacctctgagctgttcctcccagctacgagctgccccagctgtccagaccaaaacgaagaagacgttagccaaacccaatataaggaatgttgtggtggtggatggtgttcgcactccatttttgctgtctggcacttcatataaagacctgatgccacatgatttggctagagcagcgnttacgggnttgttgcatcggaccagtgtccctaaggaagtagttgattatatcat

SEQ ID NO: 2929 - DNA, 536 bp, homo sapiens
  misc_feature (510)..(510): n=unknown
ttcttaatattcctttgaaattccttatggcgcacaggtagcgtagaaaataactgcttcacgctgactgtggtccctctggggtgggggtagggggtttcctggatgattttcccatcgtgatcaaacaccagtcgagtcccaaccttcaccgacgcgtggcaggtagaaatggtgacatcgctcagtgcacacagtgagctcagagcttccccctgaaaaccgaaagtttcaacttcagttaggtcggcaaactcttgaatcttacatgtgtgatgtttcagagctgaaagagactgtaaagtaaggactaagatacctcaagtgccaaaacaacggatatacatgatatctagtaactggcttaaaaaactgtttttgcgtttcccaagacagtgttactcaaaattctgagacatgtggcccaattattttataataggattagaaaaagtcaacttacttaagccttcaaagttttcttcttctaccccacatccattgtctganacttcaatgagatccactccatagtc

SEQ ID NO: 2930 - DNA, 488 bp, homo sapiens
  misc_feature (212)..(212): n=unknown
gcaagaacatgaaacacctgtggttcttcctcctgctggtggcagctcccagatgggtcctgtcccaactacacctgcaggagtccggctcaggactggtgaagccttcacagaccctgtccctcacctgcactgtctctggtgactccatcagcattggtccttactcctggaactggatccggcagccaccagggaagggctggaatggnttgggaacatctatcatagtgggagcacccactacaatccgtccctcaacagtcgagtcaccatatcaatagacgggtccaagaaccagttttccctgaaggtgaactctgtgaccgccgcggacacggccgtgtattactgtgtcagagatggttcgacgtggaaacatctaggatgatggttttgatatctggggccaagggacaatggtcaccgtctcttcagcatccccgaccagccccaaggtttcccgctgagcttcgacagaaccccca

SEQ ID NO: 2931 - DNA, 572 bp, homo sapiens
gggcggctcagtagcaggtgccgtccacctccgccatgacaacagacacattgacatgggtgggtttacccgccaagcggtcgatggtcttctgtgtgaaggccagcggcagggcctcgtggcccaccatgcaggagaaggtgtcccccttcttccagtcctcggctgccacgcgcagtatgctggtcacagcgaaggtggtggtgccctggctgggctcctgccgggatgcccaagtcaggtacttctcgcggggcagctcctgtgacccctgcagccagcgaaccagcacatccttggggctgaagccgcgtgccaggcacgtcagcgtcaccagctcgttcagggccagctcctccgacggcggcggcagcaggtggacctcgggccggaatgtgtttccggattttgtgatgttggcggttagtggggtcttcaactcggggtgggcagcagtgcaggtgaaggtctccccatggttccatggctgggcacagcaggcaggacactggacaacgctgtagcagccacagaggtcacgctcaggtggtcttgaacagcgctcttcccac

SEQ ID NO: 2932 - DNA, 385 bp, homo sapiens
gcaaatgtacttggaaaatcacagttcccgaaggaaaagtagtcgtctcaatttccgattcatagacctcgagagtgacaacctgtgccgctatgactttgtggatgtgtacaatggccatgccaatggccagcgcattggccgcttctgtggcactttccggcctggagcccttgtgtccagtggcaacaagatgatggtgcagatgatttctgatgccaacacagctggcaatggcttcatggccatgttctccgctgctgaaccaaacgaaagaggggatcagtattgtggaggactccttgacagaccttccggctcttttaaaacccccaactggccagaccgggattacctgcaggagtcattgtgtgtggcacattgt

SEQ ID NO: 2933 - DNA, 381 bp, homo sapiens
  misc_feature (219)..(219): n=unknown
  misc_feature (332)..(370): n=unknown
gcaagacaagattgtaacacctcagggcaaaggcttgaaggtgaaacaaataacactataaatattgcacttctaaaatctttttttgacatcttcacacaactcaattctaaaatatccttttacagagatgtataaataaacgcttccaagctgtcaacgcttgacacttttagcttcctatcaccgcactaagtcggcaggtttccaatcagatanctgctcctctgacagcaggcaaagaacttccctcagctatctcggaggcctcatacctccatcatgtgaagagtcaaccagtcccatctttcggaatcctctttcagaatatntaattttataagtattttttttctactgagagnacatngatctttcaaa

SEQ ID NO: 2934 - DNA, 480 bp, homo sapiens
caggcaggcaggggcagcaagatggtgttgcagacccaggtcttcatttctctgttgctctggatctctggtgcctacggggaccttcgtgatgacccagtctccagactccctggctgtgtctctgggcgagagggccaccatcaactgcaagtccagccagagtgttttatacagctccaacaataagaactacttagcttggtaccagcataaaccaggacagcctcctaagctgctcatttactgggcatctacccgggaatccggggtccctgaccgattcagtggcagcgggtctgggacagatttcactctcaccatcagcagcctgcaggctgaagatgtggcagtttattactgtcagcaatattatagtaccctgttcacttttggccaggggaccaggctggagatcaaacgaactgtggctgcaccatctgtcttcatcttcccgccatctgatgagcagttgaaatc

SEQ ID NO: 2935 - DNA, 447 bp, homo sapiens
  misc_feature (18)..(94): n=unknown
  misc_feature (369)..(444): n=unknown
gcataattaaagccaagnnggaggaggggggtgaggtgaaagatgagctggaggaccgcaataggggtaggtcccctgtggaaaaagggtcagnggccaaaggatgggagggggtcaggctggaactgaggagcaggtgggggcacttctccctctaacactctcccctgttgaagctctttgtgacgggcgagctcaggccctgatgggtgacttcgcaggcgtagactttgtgtttctcgtagtctgctttgctcagcgtcagggtgctgctgaggctgtaggtgctgtccttgctgtcctgctctgtgacactctcctgggagttacccgattggagggcgttatccacttccactgtacttttgnctctctggggatagaagttattcagcaggcacacaacagaggcagttccagatttcaactgctcatcagatggcnggg

SEQ ID NO: 2936 - DNA, 441 bp, homo sapiens
cggaggtgaaggacgtccttccccaggagccgactggccaatcacaggcaggaagatgaaggttctgtgggctgcgttgctggtcacattcctggcaggatgccaggccaaggtggagcaagcggtggagacagagccggagcccgagctgcgccacagacccgagtggcagagcggccagcgctgggaactggcactgggtcgcttttgggattacctgcgctgggtgcagacactgtctgagcaggtgcaggaggagctgctcagctcccaggtcacccaggaactgagggcgctgatggacgagaccatgaaggagttgaaggcctacaaatcggaactggaggaacaactgaccccggtggcggaggagacgcgggcacggctgtccaaaggagctgcaagcggcgcaagcccggctgggcgcggacatggaggact

SEQ ID NO: 2937 - DNA, 440 bp, homo sapiens
  misc_feature (339)..(412): n=unknown
gcggaggtgaaggacgtccttccccaggagccgactggccaatcacaggcaggaagatgaaggttctgtgggctgcgttgctggtcacattcctggcaggatgccaggccaaggtggagcaagcggtggagacagagccggagcccgagctgcgccacagaccgagtggcagagcggccagcgctgggaactggcactgggtcgcttttgggattacctgcgctgggtgcagacactgtctgagcaggtgcaggaggagctgctcagctcccaggtcacccaggaactgagggcgctgatggacgagaccatgaaggagttgaaggcctacaaatcggnactggaggaacaactgaccccggtggcggaggagacgcgggcacggctgtccaaggagctgcaggcggcgcangcccggctgggcgcggacatggaggact

SEQ ID NO: 2938 - DNA, 289 bp, homo sapiens
  misc_feature (215)..(215): n=unknown
gcccagaggcctttgggccaaaggcagccccgccggtccttctttgaatccttcatccggaccctcatcatcacgtgtgtggccctggctgtggtcctgtcctcggtctccatttgtgatgggcactggctcctggctgaggaccgcctcttcgggctctggcacttctgcaccaccaccaaccagagtgtgccgatctgcttcagagacctggnccaggcccatgtgcccgggctggccgtgggcatgggcctggtacgcagcgtgggcgccttggccgtggtgggcg

SEQ ID NO: 2939 - DNA, 253 bp, homo sapiens
  misc_feature (18)..(40): n=unknown
  misc_feature (144)..(245): n=unknown
gcagttggtggcactgangcaccctcctggnctctggcnntgcagaccaggtgcagaggccccccggccatttctggctgaccacccacaagttatcggcaaacaggcagccgtttcaaggcccttgtgccaacccagccccancagaggccacatgctggaaaagtcccattttgaccatattttnttgtggaatatgatgtcccnggagggggcctaaaatttccacggtnattcacagggangggtgatg

SEQ ID NO: 2940 - DNA, 342 bp, homo sapiens
  misc_feature (159)..(159): n=unknown
acgggtcatgagcgcggtattactgctggccctcctggggttcatcctcccactgccaggagtgcaggcgctgctctgccagtttgggacagttcagcatgtgtggaaggtgtccgacctaccccggcaatggacccctaagaacaccagctgcgacanggcttggggtgccaggacacgttgatgctcattgagagcggaccccaagtgagcctggtgctctccaagggctgcacggaggccaaggaccaggagccccgcgtcactgagcacggatggggcccggcctctccctgatctcctacacttcgtgtgcgccagaggattctgcaacaaactcgt

SEQ ID NO: 2941 - DNA, 203 bp, homo sapiens
  misc_feature (129)..(176): n=unknown
cagcgtcccctctcccatagggcaagtccggatgctccaggctctccccagtgttgctgttaggtgagtagatatgaatgattgtgtgtggggaagatgattcatggacagaatgggaaagaatctggngtccaangccattaggntatgaggtcanagggaggttnagtgtgggnggtcagcagcggtgaaaaatcgtgggg

SEQ ID NO: 2942 - DNA, 488 bp, homo sapiens
  misc_feature (395)..(431): n=unknown
gcttcagccgcagtcgccactggctgcctgaggtgctcttacagcctgttccaagtgtggcttaatccgtctccaccaccagatctttctccgtggattcctctgctaagaccgctgccatgccagtgacggtaacccgcaccaccatcacaaccaccacgacgtcatcttcgggcctggggtcccccatgatcgtggggtcccctcgggccctgacacagcccctgggtctccttcgcctgctgcagctggtgtctactgcgtggccttctcgctggtggctagcgtgggcgcctggacggggtccatgggcaactggtccatgttcactggtgcttctgttctccgtgacctgatcatcctcatcgtggaagctgtgcgggctccaggccggntccccctgtcttggngcaacttccccatcacttcgntgctatgcggcctcttctgctctcggctcatcattacccacaactatgtcagtctgt

SEQ ID NO: 2943 - DNA, 326 bp, homo sapiens
  misc_feature (57)..(93): n=unknown
cacaccttcctccactgggagaaagagggcccaatccccagctacccaccccccacnnnnnnnnnnnnnnnnnnnnnnnnnnnnnnnnnnnnntaaggcacagcgagggtgggcaggcatgctttggcaatggggccccttggggggctgtggcatggacggctgcaaggggtgtggatgtgagctcagcacctttggaggtgggtggaggcaaggagagaaagaagtctcagggctcccaaggacacaggagaaggtgcttgcaaaacaggcagataagaaagccgacaggaaacccagaaaagagatgagaaaaaagaagagtg

SEQ ID NO: 2944 - DNA, 454 bp, homo sapiens
cttttcattgcaggagaagaggacaaagatactcagagagaaaaagtaaaagaccgaagaaggaggctggagagaccaggatccttccagctgaacaaagtcagccacaaagcagactagccagccggctacaattggagtcagagtcccaaagacatgggcttgttagagtgctgtgcaagatgtctggtaggggccccctttgcttccctggtggccactggattgtgtttctttggggtggcactgttctgtggctgtggacatgaagccctcactggcacagaaaagctaattgagacctatttctccaaaaactaccaagactatgagtatctcatcaatgtgatccatgcttccagtatgtcatctatggaactgcctctttcttcttcctttatggggcctcctgctggctgagggcttctacaccaccggcggcagtcaggcagat

SEQ ID NO: 2945 - DNA, 336 bp, homo sapiens
  misc_feature (3)..(164): n=unknown
  misc_feature (284)..(329): n=unknown
ganctattcaggtctcaaactctttctgcctatcnnttttcctggaagcttancanctgaatagctgatgagtggtgcattctgttatgtgatctatatcaggagaaaataacctttatgttaaacctaactcttancacaccaagataacattgctaagtaanatcattttccattagctagaaagagcgatcagattactcaaattgagattcaaattcaccagatctgtttctgcaaaggcagaatacttgtagaaaatcccaatagtattccactagccnatttttaatancattngtgangcttaatgtccaantttcctagtntaaagaa

SEQ ID NO: 2946 - DNA, 255 bp, homo sapiens
atggctttggccagaccaagaccgagacttggagacctgattgagatttctcgctttggctatgcacactgggccatctacgtgggagatggctatgtggtccatctggctccggcaagtgaaattgctggagctggtgcggccagtgtcctgtctgccctgaccaacaaagccatagtgaagaaggaactgctgtctgtggtggctgggggagacaactacagggtcaataacaagcacgatgacagatacaca

SEQ ID NO: 2947 - DNA, 475 bp, homo sapiens
  misc_feature (124)..(194): n=unknown
  misc_feature (374)..(374): n=unknown
aaatacattttcctgtgcttttaactccattaaaataaagattcatgaacacaaaacagtaaaatcagtaaaccaaactccactcctgctggctaaataatattcctccgtaagaattggtggntgttgggacaatttcttggattattgccttttcccgcttgcttctggccagcaggatcccccacaaggcntgcggcagccagcaggcctgctgccacacctactgtcgtgactgcaccagtgacctggtcactgcgggagacgccatagcgcagatggttcacgaagtgcttcgcagttgtcactggtcagcgaataaggcaactcctgccccaccaactcctctgcccgcttgacgattttgttggaangcagtggtgtgtatctgtcatcgtgcttgttattgaccctgtagttgtcttcccccaagcaaccacaagacagcagtttccttctttcactatgggctttg

SEQ ID NO: 2948 - DNA, 321 bp, homo sapiens
gctcagctgtgggcttaggaagcagagcctggggcatctccaccatggcctggacccctctcctcctccagcttctcaccctctgctcagggtcctgggcacagtctgcgctgacccaggaagcctcggtgtcagggaccgtgggacagaaggtcaccctgtcctgttctggaaacaacaacaacattggaagttatgctgtgggctggtaccaacagatttctcacggtgttctcaaaactgtgatatttggaaattctccgccctcagggatcccttaccgttctctggtcaaagtctgggaccacagcctccctgact

SEQ ID NO: 2949 - DNA, 178 bp, homo sapiens
  misc_feature (20)..(168): n=unknown
tgcagggagaagggcttgangccttgnggtgggangagagacccctcccctgggatcctgcagctctagtctcccgtnnngggggtgagggtttagaacctatgaacattctgtaggggccactgtcttctccacggtgctcccttcatgcgtgacctggcagctgnngcttctgtgg

SEQ ID NO: 2950 - DNA, 229 bp, homo sapiens
  misc_feature (187)..(222): n=unknown
gaacagcaactgctgaggctgccttgggaagaggatgatcctaaacaaagctctgatgctgggggccctcgccctgaccaccgtgatgagcccttgtggaggtgaagacattgtggatttagaagatttgacccgcaatttgcactgacaaacatcgctgtgctaaaacataacttgaacatcgtgnttaaacgcnccaactctancgntgctaccaatgangttcctg

SEQ ID NO: 2951 - DNA, 543 bp, homo sapiens
ttcctttatcctaatttatttctccatcatacttttaaaagccatattgaaattagtacaaacttattttttggttttaaaatttttgctataacaattctgagcaaagggcagagagtatccattaacttcattgttgcctgaattgagggatgggcggcagtgccaagggtgagaacacaaagaagaaagaaatattaatgtcagctaagaaatcaacatattatcaggctatattgtacttggttgcttctgtgttactggatatgaaatatgatctgggaaatgagatgaaattggcttgaaacatgagagtgtcacaattcttagccataggttcagtcagccccggatgaaagatagaaaaatttgacatagatctcttaaagggaatttattgcttccatggagattttagatcgatgttactgaggaattaggtagctgggcggcttaccccaggcatctcttagtaggtaacaccttccttttcaggatgggattcacaagggcccttggtgtctggaagcaccaactgaacgc

SEQ ID NO: 2952 - DNA, 361 bp, homo sapiens
  misc_feature (355)..(357): n=unknown
aggacgtgaaaatctgccttctcaccatgaggcttctagtcctttccagcctgctctgtatcctgcttctctgcttctccatcttctccacagaagggaagaggcgtcctgccaaggcctggtcaggcaggagaaccaggctctgctgccaccgagtccctagccccaactcaacaaacctgaaaggacatcatgtgaggctctgtaaaccatgcaagcttgagccagagccccgcctttgggtggtgcctggggcactcccacaggtgtagcactcccaaagcaagactccagacagcggagaacctcatgcctggcacctgaggtacccagcagcctcctgtctcccctttcngncttc

SEQ ID NO: 2953 - DNA, 299 bp, homo sapiens
  misc_feature (149)..(263): n=unknown
ggacaagatgaggcccggcctctcatttctcctagcccttctgttcttccttggccaagctgcaggggatttgggggatgtgggacctccaattcccagccccggcttcagctctttcccaggtgtttgactccaagctccagctttcnagcttccaagcttccnaggtccggggctcccagcttccaagcccgcaagctttaagggcnagcgggagggtttctgtggtccccaagtttgttttttcccnaatttttcnaccngggcttccggtgggaatggaacccgtgggggaacct

SEQ ID NO: 2954 - DNA, 630 bp, homo sapiens
  misc_feature (597)..(597): n=unknown
tagcatatgaaaagcggttattataggcagcattagggagagtttgagtcacagcaatcgtgttggtggtcaggttaactctggcaatattcccggtgttgtacatgttgacgtacatgttgttgttgtaaactgctgtaccactaccttggccataggtgatccgcaactctcgagcatttatatacaatagcaaatcatccagtgtgttgtacagtctataatactccaacagtctcccatctgtattcaatggcgccacccaatacagtcctttgtttggatgctggggagagtaatccctaccccaagcaccatatagataagaaaaccctctccagttgagctgaaccacagacggtttgctgatgttcaccacaccaccatgaccacagctccctggagtgggaggagggtggacgacaggggtgttttgatctttagaggcctcacactctttcagcttggtcttcagagccacgatttctcggcgaatggcaaggacattgtttttgtctagtgtctcaagcttctctaccaagagagtcatatttcttatctccacctccagctggtcaacaatttctgagcttccancaaaactctccttcagctgtatgaccagttttc

SEQ ID NO: 2955 - DNA, 229 bp, homo sapiens
gcttgacctgcggcagtgcagcccttgggacttccctcgccttccacctcctgctcgtctgcttcacaagctatcgctatggtgttcgtgcgcaggccgtggcccgccttgaccacagtgcttctggccctgctcgtctgcctaggggcgctggtcgacgcctaccccatcaaacccgaggctccggcgaagaccctcgccggaggagtgaaccgctactacgcctccc

SEQ ID NO: 2956 - DNA, 406 bp, homo sapiens
  misc_feature (253)..(351): n=unknown
accacacacagccctccagcccagggggcgggggcaccgagacgcgggcggagggccgcacccgaaccctgcccagacgccgccgtcgggaggcagaatccgggtttctggggtcgggagtgcgtatgcaaatgacgtgggcgtggttggcagatctcccaggaggcctcaggggtcctcaccacaggtctgggccctccgacctgcggaagcgaaggggaaggaattggatctggggaggcgagcctggganacgtcgttaagtgatgttgccagggtagggccaggccgcgctctcggatgcaggatgtgtggtaacgggcgttttaccgcgacctgacgggggcggtnctcgccgtcggggaagaacgttttggaaagaagcgtgtccggggccgtctctttt

SEQ ID NO: 2957 - DNA, 523 bp, homo sapiens
cagcattgcagcagctccaccatggcctgggctcctctgctcctcaccctcctcagtctcctcacagggtccctctcccagcctatcttgactcagccaccttctgcatcagcctccctgggagcctcggtcacactcacgtgcagtgtgagcagcgactacaagaatcttgaagtggactggtttcagcagagaccagggaagggcccccgttttgtcatgcgagtgggcactggtggcgttgtgggattcagaggggctgacatccctgatcgcttttcagtctcgggctcaggcctgaatcggtttctgaccatcaggaacatcgaagaagaggatgagagtgactaccactgtgggacggaccttggcagtgggaccagcttcgtgtcttgggtgttcggcggagggaccaagttgaccgtcctaagtcagcccaaggctgccccctcggtcactctgttccccgccctcctctgaggagttcaagccaacaaggccacactggtgtgtctcataagtg

SEQ ID NO: 2958 - DNA, 604 bp, homo sapiens
  misc_feature (6)..(64): n=unknown
  misc_feature (180)..(278): n=unknown
  misc_feature (386)..(390): n=unknown
cttgangccttgnngngggaggnganacccctcccctgggatcctgcagctctagtctcccgtngggggggtgagggtttagaacctatgaacattctgtaggggccactgtcttctccacggtgctcccttcatgcgtgacctggcagctgtagcttctgttggacttccactgctcannnntcaggntcangtagctnctggnngcntacttgttgttgctttgtttggngggtgtngtggtctccactcccgccttgacgggnctgctatctgcnttccaggccactgtcacggctcccgggtagaagtcacttatgagacacaccagtgtggccttgttggcttgaagctcctcagaggagggcgggaacagagtgaccgangggncagccttgggctgacttaggacggtcaacttggtccctccgccgaacacccaagacacgaagctggtcccactgccaaggtccgtcccacagtggtagtcactctcatcctcttcttcgatgttcctgatggtcagaaaccgattcaggcctgagccgagactgaaaagcgatcagggatgtcagcccctctgaatccacaacgccaccagtgc

SEQ ID NO: 2959 - DNA, 303 bp, homo sapiens
  misc_feature (72)..(297): n=unknown
cccccggccgcagtatgctggccgctctcatcgctgcccaggccacggccctcaatcgggggaagggactcntccccgagcccaacatcctgcagctgctcaacaacctgggcccatccgcntncctccagctgctgctcnnncccctgctccatggcagtgcgggggggaagcagggnctcctggntntncccccagccatgcngctgctcaatgggccagccctgtncacggcgctgttgcagctcgcnctgcaganccagggccagaagaagcncggnatcctgggagantnanccctgg

SEQ ID NO: 2960 - DNA, 504 bp, homo sapiens
  misc_feature (192)..(222): n=unknown
  misc_feature (362)..(413): n=unknown
agactggggtggggtcgggggaatagtccccttggagtggatgtggacccccagagtcaagggagggaagctggtggcccagttggctgggggcaaggcccagggtcacctcaggtcgacaggtcctgctggtgggcgggcccagagtttatcttcatggagtgctggtttctggcactgggctggaaggangccagctccagggatctggccggnngtggncaggcagaattcaagaattcatcttcaacaagcgagtgacagcagaggctccgggagatgggcacaatgtccgactcccacatacagacagcaggggactggcagagaaagcccatctctgcacggaggcccgggtaggnnggggtggtggggccggttcgccaagatgaaggctttccccttctactgtncccaaggtggagatcctgggtagggtggcccaatccctaagccaaatctgtttggtccatagtcaagctcccagaacttggcatctgtggc

SEQ ID NO: 2961 - DNA, 529 bp, homo sapiens
  misc_feature (20)..(21): n=unknown
  misc_feature (503)..(515): n=unknown
gatcccacaaaaggttctgnngagatttgatgggaataaaccagataccttaggtctcaatactcggctctacaagtggataccccagaatgaccttctaggtcatccaaagaccagagcttttataactcatggtggagccaatggcatctacgaggcaatctaccatgggatccctatggtggggattccattgtttgctgatcaacctgataacattgctcacatgaaggccaggggagcagctgttagagtggacttcaacacaatgtcgagtacagacttgctgaatgcattgaagagagtaattaatgatccttcatataaagagaatgttatgaaattatcaagaattcaacatgatcaaccagtgaagccctggatcgagcagtcttctggattgaatttgtcatgcgccacaaaggagctaaacacttcgggttgcagcccacgacctcactggttccagtaccactctttgggatgtgattggggtcctgctngtctgtgtggcnactgtgatatttat

SEQ ID NO: 2962 - DNA, 484 bp, homo sapiens
  misc_feature (430)..(471): n=unknown
gctggaataaactgaagtagtctcacctatcaggttttccagcttcaaatctcagatataactaatcattttttcccttctttgcttttctagcaaacttccagaaacaaaacagacaacattttgtgacgataaatatcacagttgccacacagaccagcaggaacccaatcacatccaaagagtggtactggaaccaggtgaggtcgtgggctgcaacccgaagtgtttagctcctttgtggcgcatgacaaattcaatccagaagactgctcgatccaggggcttcactggttgatcatgttgaattcttgataatttcataacattctctttatatgaaggatcattaattactctcttcaatgcattcagcaagtctgtactcgacattgtgttgaagtccactctaacagcttgctcccctggncttcatgtgagcaatgttatcagggtgatcagcaaacnatngaatccccaccat

SEQ ID NO: 2963 - DNA, 346 bp, homo sapiens
  misc_feature (159)..(318): n=unknown
ggatcatccttccaaagggactttctctgggaagcctgctcctcgggccactgcgaaccctctctactctccgaaggaattgtccttcctggcttccactacttccacccctgaatgcacaggcagcccggcccaagtctcccactagggatgcagatngattcggtgtgaagggcnngctgcngttgcctccggctcttgaaagtcaagttcanaggcgtgcaaagactccagaattggaggcatgatgaagactctgctgctgtttgtggggctgctgctgacctnggagantnggcaggtcctnggggancnganggtctcagacaatgagctccaggaaatg

SEQ ID NO: 2964 - DNA, 506 bp, homo sapiens
  misc_feature (183)..(183): n=unknown
  misc_feature (388)..(491): n=unknown
gagcaattctgttcttcccatgagcagcagagtcgagtgttagagtgcaggatccagagcggggagaggctgggcggagttgggggcctggaggctggggcctggttacttggtgacgtgcagagctctctctggggggctgcagctcatcttggggggagctggactcagatgcccccgtangtgcaaaagcaacatccacatctcactcctcccggtgctttttgcggtattcctgcagcgctttctccgccacggtctccataaatttagggttcttcctggagacttctacagggaccgtcacagtgatgggatcagagtcaaaaagcttcacgaccacctcagtgacaccggaaggaacgtccgagtcagaagtgtgggaaancaccgtggtgacccgcagatagtactggtcttcgcttgcgtgaggtttgccaanccgggacaccagttaaactgctcgttcagctgctccaacaaaggaggangtgttgagcatcttc

SEQ ID NO: 2965 - DNA, 539 bp, homo sapiens
  misc_feature (148)..(187): n=unknown
  misc_feature (304)..(304): n=unknown
  misc_feature (505)..(520): n=unknown
gagggcttgccttccctcccgcctgaccttcctcagtcatttctgcaaagccaaggggcagcctcctgtcaaggtagctagaggcctgggaaaggagatagccttgctccggcccccttgaccttcagcaaatcacttctctccctgnnnnnnnnnnnnnnnnnnnnnnnnnnnnnnnnnnnnnnnntttttcctgtcaggttaacttatttgtaggttctgcattattagaactttctagatatactcattccatctccccctcatttttttaatcaggtttccttgcttttgccatttttcntccttcttttttcactgatttattatgagagtggggctgaggtctgagctgagccttatcagactgagatgcggctggttgtgttgaggacttgtgtgggctgcctgtccccggcagtcgctgatgcacatgacatgattctcatctgggtgcagaggtgggaggcaccaagtgggcaacccgtggggggttaagggcttngaagagtgggcacangactggggcacgcttcagt

SEQ ID NO: 2966 - DNA, 592 bp, homo sapiens
  misc_feature (578)..(578): n=unknown
aatgtctggatattttggaattaatatctcggacttctttctaatccacattggttcatcttgttcattatgaacagaggattctactttacaatgtactaaaatgttgttatgtatttcaggaccattgaacattcaagttgtttatcattttctttgaccaccaacattgctgtaatgaatagggatttaagagcaaaagtaacgagaatacttgcttaaccacttatgaaaacatatcataaaagtagaacaatcaaaatggtggatgccatagagaaagcaaggtaacaaaataggaagcctagggaccaataaagtatatatacaaggatttcctatatcacaaaagtaacacttcaggtacatggaaaaagaatttcagtaccaaaaggcacctcagtctcacatccacacattcaaaaataattaaaattttacatgaaaagttggaaacacaaaatgaactagaaaaacaatatataaattaggacaaacactgctttgcaatgggaggacctttgtaaatctgacagtaaaagtgaagaaggagtttactagggtctgtttgacttacngaagcattcatatt

SEQ ID NO: 2967 - DNA, 344 bp, homo sapiens
  misc_feature (270)..(337): n=unknown
ggagacctaaacacagtcaccatgaagctgggctgtgtcctcatggcctgggccctctacctttcccttggtgtgctctgggtggcccagatgctactggcagctggatgtcatgccgctgccagttttgagacgctgcagtgtgagggacctgtctgcactgaggagagcagctgccacacggaggatgacttgactgatgcaagggaagctggcttccaggtcaaggcctacactttcagtgaacccttccacctgattgtgtcctangactggctgatcctccaaggtccagccaagccagtttttgaaggggacctgatggttctgcgctganaggcctg

SEQ ID NO: 2968 - DNA, 519 bp, homo sapiens
  misc_feature (444)..(463): n=unknown
cacagagaccccgcctcacaggacaggtggagaccctggcaggaggagcagaagggaaggaaggaaagagaagagaagctggggatggggtggatgatctgaagcagctgcaggatgttgagggaggtgcaggaaaagcagacatgtgtgctgtgggacagcacaggcccaggactgtccaggccagggatgggcatgcagagcatgtctgaaaggagagaggggttccagccaggcaagctgctcttcctgcaatgtttgcgcctcccactatggtcctccttatactctgcacctccccatctagctcttcctcggaggcagcattgttaagggaggccctgtgcaagtgctggaggacgaggaactaaagtcccagccagagcccctagtggtcaagggaaaacgggtggctggaggcctcagatgatccagctcagcctnttatgggaagcgcctctanatcaccacgtcgtgtacagtgcctgggacaagcagttttaccctgatctcatcagg

SEQ ID NO: 2969 - DNA, 370 bp, homo sapiens
  misc_feature (245)..(245): n=unknown
gagctcatggaaaagcagcacagtgagcaacaagcaacagtggtcagtaaatgtatatgactcaacacattgccacagtctcagcttggctgtgtggtacatgctgccaagggtcgggtgccaagagagagcagaatgaagccaggtccccaaggaagtgagggcccaaaatagggagtgtgggtgatgagggtggagttcaaatcccagatgtcagagctacaatcgcccccagggtagcggantcatgggcaagggctgggccaaggggctccttcccgaagtccaccaggaagttggggttcaacttcagccctccttttactgtgtctacatcaacctgcagcatcacagagcttccctgatgaga

SEQ ID NO: 2970 - DNA, 525 bp, homo sapiens
  misc_feature (253)..(254): n=unknown
gtgaaatctccaactcttaaccttcaacatgaaagtctctgcagtgcttctgtgcctgctgctcatgacagcagctttcaacccccagggacttgctcagccagatgcactcaacgtcccatctacttgctgcttcacatttagcagtaagaagatctccttgcagaggctgaagagctatgtgatcaccaccagcaggtgtccccagaaggctgtcatcttcagaaccaaactgggcaaggagatctgtgcnnacccaaaggagaagtgggtccagaattatatgaaacacctgggccggaaagctcacaccctgaagacttgaactctgctacccctactgaaatcaagctggagtacgtgaaatgacttttccattctcctctggcctcatcttctatgctttggaatacttctaccataattttcaaataggatgcattcggttttgtgattcaaaatgtactatgtgttaagtaatattggctattatttgacttgttgctggtttggagttaattgagt

SEQ ID NO: 2971 - DNA, 484 bp, homo sapiens
  misc_feature (464)..(464): n=unknown
tcctactattgcattcatctttccacaataacatatttagcaacacctcacattcacaaagagctctccttcctacattgcagcatcccttcatgtccatgactcccacaggcatgctctcaacccctgggaaccgaatacaaacccactgccagcagctcatagtggaagggaagggggcttagagacagcaacctacttgctcaaggccttgctttagaaaagatcagcaatactcaaataaactccaaaccagcaacaagtcaaataatagccaatattacttaacacatagtacattttgaatcacaaaaccgaatgcatcctatttgaaaattatggtagaagtattccaaagcatagaagaggaggccagaggagaatggaaaagtcatttcacgtactccagcttgatttcagtaggggtagcagagttcaagtcttcagggtgtgagctttccggnccaggtgttcatataattct

SEQ ID NO: 2972 - DNA, 423 bp, homo sapiens
gagcctcatcccctcctcatttcagcaacagcacacaggacaatacgctctagaagaactctttgacttaaaggtatatgattgtttttgttcctttaacatgaacgtgagtctggagaaacagctacggccatcccagccctggccaaggggaaaatgccggaagactccagggtgggaggaagcgcgtcccaaggcccaggatctgcgaggcgacttggggaaaacgcaggcaggacctgctgaagctcacacccgtggaccacccagactgcctgccgctacaggatgccctccgcatctcccaggacttctttccggcatcagtgtggacattgaccccactggactgcagtcacagtggactcccaaggggcaggatccacctctgatgttcagtgaagactaccagaaaagtctgct

SEQ ID NO: 2973 - DNA, 448 bp, homo sapiens
  misc_feature (77)..(114): n=unknown
  misc_feature (251)..(414): n=unknown
acagcgagaagggctgaatggcttgggatgcagagagagacgcctcccctgggatcctgcagctccaggcccctgtnggtggggtgggggctggaacctatgaacattctgcangggccactgacttctccacggtgctcccttcttgcataacatggcagctgtagcttctgcgggacctccactgctcgggcgtcaggctcaggtagctgctggccacgtacttgttgttgctctgtttggagggcgtngtcatctccacgctctgggtgatnagggtaccatctgccttccaggtcaccatcaagattcccggataaantnattcatgagacacaccagtgtggcnttnttggcttggggctcctcacaggacggcaggaacagaatgaccggacggggtnagtctntggngttgacactggttagtcatgaaatcggcaaaatt

SEQ ID NO: 2974 - DNA, 501 bp, homo sapiens
cgttgacatggactttgaagtggaaaatgctgtgctgggaaaagacttcaagctctccatcaccttccggaacaacagccacaaccgttacaccatcacagcttatctctcagccaacatcaccttctacaccggggtcccgaaggcagaattcaagaaggagacgttcgacgtgacgctggagcccttgtccttcaagaaagaggcggtgctgatccaagccggcgagtacatgggtcagctgctggaacaagcgtccctgcacttctttgtcacagctcgcatcaatgagaccagggatgttctggccaagcaaaagtccaccgtgctaaccatccctgagatcatcatcaaggtccgtggcactcaggtagttggttctgacatgactgtgacagttgagtttaccaatcctttaaaaagaaaccctgcgaaatgtctgggtacacctggatggtcctggagtaacaaagaccaatgaagaagatgttccgtgaaatc

SEQ ID NO: 2975 - DNA, 554 bp, homo sapiens
taattaataataatatactaagttaagccagtttaactgtctagcaaaatgcatttcattttaaaattggatattgggagacttggcaaatgctgtgagattacttagtaaagttaagtatgatgtatatatagaggggaccagctcaccctcataggttagtgctgaaggctcaggaacagtctcaaaggcttagaaatgtggttatatagaccagagcattccattctgattttgcccccagtatacttatcactgttcattttttgctaagaatcacagtctactgacctaaatcacaccctagacatatcagagggaaattctgaccataaatcagccttgcaaatacatagcaggcagccttctctgtagtagccttggaacataatacaaatgatgtcagcatcctctgtggttgggtcagaactagcactggctatttgcaaggctgagtccatattacccttcagcacctgagtgccaagctgaggtctcaacatgggtgatgtgaaggacaagagagaatcagtggctgcagtccttctatatat

SEQ ID NO: 2976 - DNA, 499 bp, homo sapiens
  misc_feature (486)..(486): n=unknown
ttttgagctgaaatgctgcattttaattttaaccaaaacatgtctcctatatcctggtttttgtagccttcctccacatcctttctaaacaagattttaaagacatgtaggtgtttgttcatctgtaactctaaaagatcctttttaaattcagtcctaagaaagaggagtgcttgtcccctaagagtgtttaatggcaaggcagccctgtctgaaggacacttcctgcctaagggagagtggtatttgcagactagaattctagtgctgctgaagatgaatcaatgggaaatactactcctgtaattcctacctccctgcaaccaactacaaccaagctctctgcatctactcccaagtatggggttcaagagagtaatgggtttcatatttcttatcaccacagtaagttcctactaggcaaaatgagagggcagtgtttcctttttggtacttattactgctaagtatttcccagcacatganaccttattttttc

SEQ ID NO: 2977 - DNA, 548 bp, homo sapiens
  misc_feature (479)..(479): n=unknown
aaagcacatccggcataaagtgtaaaccagtgtctcaaaccactggaagaaccgggagagcaaacatgatttttcttatttcctctaagtaatctttctttagtaaaacaacaagtgatctttggcatagattcatactttaaaggcattaatattgcatttatatcaggcaagcaactatacaaatatgctgagggccttgaaaataatcatcctcattttaaaggaaatagtgaaagcctgagtgtaaaggaccaacttaagttgtacacattcgatgttgggaactaacacacagcgatgggtgggaaggaaggatgttcaggcaaggttcttactcctttactcatctggttctggctttgggaaaaaataaggtttcatgtgctgggaaatacttagcagtaataagtaccaaaaaggaaacactgccctctcattttgcctagtagggacttactgtggtgataagaatatgnaacccattactctcttgaaccccatacttggggagtagatgccagagagcttgggttgtaagttgggtg

SEQ ID NO: 2978 - DNA, 493 bp, homo sapiens
  misc_feature (427)..(460): n=unknown
gtgtgagacagtgcacctggccgaaatagctcaagtttctgaaaaacaaatctgaatctatttgttattcttagcgtcactggtctggctttcagaattaacatacaaggttgccacacctagttctgcccagctttatgtcttttattccagtattccaccaaagtttgttttcctgcattccagttctcaagtcttaagataaagattgtacttgacagtttagtatatccataaaactatttgaggtggttaaggttcttgggttcattttccttaatactttgctgaatattgtagattgtaggcaatgaaaaagtctactaaattaggaaaaccttgaataattaggtatcctaggtaagagcccctaaacatcaagcaatctgtgagtctgtaaagaaataaatattttttggattattcntatccaattccacccctgntggaagtggattcnttggtccttgcaactatggaagctgtggaaaat

SEQ ID NO: 2979 - DNA, 550 bp, homo sapiens
  misc_feature (518)..(518): n=unknown
tttgatatttaaaatagtacttttacaaaatcatctcagaaaatatactacatttattaaaattcctacaaaccattgcagaaaatattaaaccctctaaccaacctaacactcgctttcagaggcacttgtgatgattttcacagcttccatagttgcaaagaacaaagaaatcatcttccaacaggggtggaattagataagaataatccaaaaaatatttatttctttacagactcacagattgcttgatgtttaggggctcttacctaggatacctaattattcaaggttttcctaatttagtagactttttcattgcctacaatctacaatattcagcaaagtattaaggaaaatgaacccaagaaccttaaccacctcaaatagttttatgggtatactaaactgtcaagtacaatctttatcttaagacttgagaactggatgcaggaaaacaaactttggtggaatactggaataaaaggcataaagctgggcagaactaggtgtggcancttgtatgttaattctgaaagcccagaccagt

SEQ ID NO: 2980 - DNA, 257 bp, homo sapiens
  misc_feature (73)..(73): n=unknown
gtttgggctaacaggatctcctcttgcagtctgcagcccaggacgctgattccagcagcgccttaccgcgcanccgaagattcactatggtgaaaatcgccttcaatacccctaccgccgtgcaaaaggaggaggcgcggcaagacgtggaggccctcctgagccgcacggtcagaatcagatactgaccggcaaagagtccgagttgccaccccaggaaaaagaggctcctctgggagatgtatgcttactctctt

SEQ ID NO: 2981 - DNA, 445 bp, homo sapiens
  misc_feature (317)..(329): n=unknown
ttgagtatcccataaaccttaatgttaaagtcatattgtaaatctctgacttcttattaccaaggacactctatctgttgcctcttactcttgacagatcttggtctcaacaataaattcgttggggaagtgtctaatcttccagcatttatcaatggcacgtttgttgaaacccagcaagaggtctctgcgacgaaggcggaaggactttctgttattgcaaagttggtaaataaagatgccaaggttactaacatcacgaatttcctccacagcaactaggtcttctcgaaccacataagtttgaggcagatatntgccactcgccngtttgccaaagagctctaccagatttttttggaggcataacaatagaagtattgaggggcatcagatagcagttccccagcaacaagtccaggtaagcagtcattccccttttcaa

SEQ ID NO: 2982 - DNA, 455 bp, homo sapiens
  misc_feature (11)..(61): n=unknown
  misc_feature (165)..(321): n=unknown
  misc_feature (450)..(450): n=unknown
gtggggctccncccctttggggatataagcccggcctggggtgctccgttctctgcctggnctgaggctccctgagccgcctccccaccatcaccatggccaagggttctatatttccaagtccctgggcatcctggggatcctcctgggcgtggcagccgtgtncacaatcancgcantgtcagtggtgtactcccaggagaagaacaagaacgcccaacagctcccccgtggcctccannaccccgtncgcctcagccaccaccaaccccgcctcggccaccaccttgggaccaaagtaaagcgtggaatcgttancgnctccccaacacgctgaaacccgattcctaccaagtgacgctgagaccgtacctcaccccaatgacaggggctgtacgtttttaaagggtccagcaaccgtccgtttcacctgcaaggagggccactgangtcat

SEQ ID NO: 2983 - DNA, 493 bp, homo sapiens
atatacagatctgctgccctgttgattcctcagatttagggtctttagggaaaggtgaaagagggtacagggcggcccccagcaaggccgttcattgtccatcgagagcttctgctcatctggccctggagctgggcttccctgagatcagccccagggcactgggcgacaggtgccatgccaggcctagggcggggttggcatgaggggcaggggctgggaggtgctcaggcagcctgggtcatcaggaactagactggctcacaggcagagagaacgtgggctggagactttgtccttgaggggaggacactggtgcctcgggctccaggaatggaggccctgcaccagccgctgggatggacacatgtgggcaccttgcatcggggccgggtgacttcaagggctggggactatttgctgttttctgtgaaccactggagcaccacctccttgttctccttcacccacttgatgttggctttcgtcttct

SEQ ID NO: 2984 - DNA, 454 bp, homo sapiens
  misc_feature (386)..(445): n=unknown
gcagcctctgggtgaacagcagcgtgtccgccggcagcgaaccgagaccagcgagccgaccatgcggctgcacagacttcgtgcgcggctgagcgcggtggcctgtgggcttctgctgcttcttgtccggggccagggccaggactcagccagtcccatccggaccacacacacggggcaggtgctggggagtcttgtccatgtgaagggcgccaatgccggggtccaaaccttcctgggaattccatttgccaagccacctctaggtccgctgcgatttgcaccccctgagccccctgaatcttggagtggtgtgagggatggaaccacccatccggccatgtgtctacaggacctcaccgcagtggagtcagagtttcttagcnagttcaaacatgaccttcccttccgnactccatgnctgangnatgcttgtaacttcagnatctacacg

SEQ ID NO: 2985 - DNA, 419 bp, homo sapiens
ctgaatggatggacggaagtatgaatgaatggcgaagtgaatgaaggaatcaacttctttctccttagtgggtgtgtgtgggcacagcaggctgaccctcgcctgtcagcgaacccaccccctcctccccggcacagggagctacagctctgtgtgtctctcttcaggctcctcgagctcctggatcttttggggcagcgccttcttccagaactggagcctgtgggccttcagagcccggcccaccgcagctgtaggttcagctgcaggtattgctcctcctggtcgaacagcggccagtgtggcagaccctcgccattggggttcccatttctcgcaaagttggcccagtacttcatcatcttcctgcttagctgctcctcttcctcagtgatttaacatggtctgccttcatgtgc

SEQ ID NO: 2986 - DNA, 481 bp, homo sapiens
cctgaagctacaggtgctccctcctggaatctccaatggatttcagtcgcagaagcttccacagaagcctgagctcctccttgcaggcccctgtagtcagtacagtgggcatgcagcgcctcgggacgacacccagcgtttatgggggtgctggaggccggggcatccgcatctccaactccagacacacggtgaactatgggagcgatctcacaggcggcggggacctgtttgttggcaatgagaaaatggccatgcagaacctaaatgaccgtctagcgagctacctagaaaaggtgcggaccctggagcagtccaactccaaacttgaagtgcaaatcaagcagtggtacgaaaccaacgccccgagggctggtcgcgactacagtgcatattacagacaaattgaagagctgcgaatcagattaaggatgctcaactgcaaaatgctcggtgtgtcctgcaaattgtaatgctaaac

SEQ ID NO: 2987 - DNA, 412 bp, homo sapiens
  misc_feature (10)..(410): n=unknown
gaatcatacnttaaagattcacaggttgacagancatanattanagtccaactaaggaaaaaaggataaacaagaaancacagttcaganatagtaganttaaaagctcaagagtatgctgacaaaagcatgatgnntagacancacnnnccagtgttagtctacnattaacttgtggtacatgtctgaattaagtattgnacaacaactttaatttttcacaatgtcgcagaacncaaaataatattttaaaaaaattacttcaaatctgcatttcaacagtctccaattttttttctgtnnnttgaggaattcggacaacatggagtcgctttctttcnctaagtattccagangtaggcatgnnttgcataagtaaacnagcnttgaaatttttaaatcnccaaganat

SEQ ID NO: 2988 - DNA, 514 bp, homo sapiens
  misc_feature (156)..(156): n=unknown
cctcagaacttgcaactttaattcagacaaagagggaacttggttgtagagctacttatatccaaaccattgaagaaggaattaatacacacactcatgcagccaaagacttctggaagcttctgggtggccaaaccagttaccaatctgctgganacccaaaagaagatgaactctatgaagcagccataatagaaactaactgcatttaccgtctcatggatgacaaacttgttcctgatgacgactactgggggaaaattccgaagtgctcccttctgcaacccaaagaggtactggtgtttgattttggtagtgaagtttacgtatggcatgggaaagaagtcacattagcacaacgaaaaatagcatttcagctggcaaagcacttatggaatggaacctttgactatgagactgtgacatcaatcccctggatcctggagaatgcaatccgcttatccccagaaaaggacaggggcggcccgactgggcgatatttgggagacttact

SEQ ID NO: 2989 - DNA, 296 bp, homo sapiens
  misc_feature (113)..(113): n=unknown
  misc_feature (288)..(288): n=unknown
ctcgggcttgaggggaagaggctgactgtacgttccttctactctggcaccactctccaggctgccatggggcccagcacccctctcctcatcttgttccttttgtcatggtngggacccctccaaggacagcagcaccaccttgtggagtacatggaacgccgactagctgctttagaggaacggctggcccagtgccaggaccagagtagtcggcatgctgctgagctgcgggacttcaagaacaagatgctgccactgctggaggtggcagagaaggagcgggangcactcag

SEQ ID NO: 2990 - DNA, 575 bp, homo sapiens
  misc_feature (538)..(572): n=unknown
atgtggagaaagtcctgttcctcaggacactgaagggaggagtgaggaagagaggacagagctggacgtctcctcctatttctccctccccaagtcactctgaggggaagaacactgctgcctgctccctgggcctgcccgcatacaaggttagagccctgggtctggggcatccttagcctgaaatttgttgacatggggcaggagagcaggagggaacattgagggttttgactcttcgggctctaaaaggattactcaggatctggagttccgtatgaaacaaaggagctgaaagaatttgattgccattggctaaaaatatagaggatttgagccacaactggcccacatttgaagaatgaggaacaagaaatttagtggggatataatataaatgtatgggagtgagaaagatgcaaaaaacaaggctagctcctcaaacctcctcctctttcttcctcatctccagcttatagacaatctggtagccatcatcccaggcatagagctggcgttctcgggggttatagcggangctggcatgggaccatatctgcggggaaaataangga

SEQ ID NO: 2991 - DNA, 400 bp, homo sapiens
aaagtactgtcaacgactccttccctgaatccagatactccttctccctgctgctcctctctccctgaagtccattgatggccatcttagcctctgccccatccagcttcccttttcctggacacaactacttcctcccccagatagttcttccctggacacatctattcattcccttagattctgggttcaattgcttctcctctcaaacactctcaattactcctctgaatctagctgcttctgccagggcccactgatggccaccccagtctctatctctacccacctacttctattttaagcccagttaacccccttcactagcttctctcccagctatcttcccctggatcagattgttctcagatcccatcaattgtcccttcctggattaaat

SEQ ID NO: 2992 - DNA, 509 bp, homo sapiens
  misc_feature (14)..(127): n=unknown
  misc_feature (348)..(502): n=unknown
tgcgtgtgtatgtnggggggagggtgtcgcaacagacagggcagcggtgggcggacgcacaggcangagacggtgcccggngagtgggggcggcagcttgccactggctggccatgcgggcgggcangctagacattcttgccgcgcaggcgcagttcgtggcgtcgcaggtggttgtagagcgactgcacataggtgaagacacacttggggtcaggcttcttgcccatgatcatcatgtcgtccacctccaccaggggcacacagtccaccagcatccgtggggccccgagcaggggttaggactttttggtttttaccagccccttctggaccagacagcggtanaattcctggatgtacgtgtacacgcacttccagtcaggctctcgaagccgcaccatgtcctctgtatccaggagctgcgggcagtccgcatgggtctccngcagatganaaggccncctcgaagttcctggcgtcggttctganggctaagctncccatag

SEQ ID NO: 2993 - DNA, 381 bp, homo sapiens
  misc_feature (226)..(372): n=unknown
ttgatgtaccacattcaacagctgggcaagtttaaggagccccatgcagcgttctacgcggcagaaatcgctatcggcctcttcttccttcacaatcagggcatcatctacagggacctgaagctggacaatgtgatgctggatgctgagggacacatcaagatcactgactttggcatgtgtaaggagaacgtcttccccgggacgacaacccgcaccttctgcnggaccccggactacatagccccggagatcattgcctaccagccctatgggaagtctgtcgattggtggtcctttggagttctgctgtatganatgttggcaggacagcctcccttcgatggggaggacgaggaggagctgtttcangccatcatg

SEQ ID NO: 2994 - DNA, 440 bp, homo sapiens
gagaggctaagggaagaggaggggaggaggagagtcccagagagtggcaggcactggggggagttggggtgggtccgagccagacaggagccatgcacggcaggcgggctgcggggagaagtgatggcttcgggatggggaagtctagaacaaaagctgattgggagcctctggggaaagaatcctccatatatcccagaaatccccagagcacagcagcgggacgtactggaggaggggggcacgcctcccactcatctagaactagagtggaggcggggagcctcggaggccgagggctgttctggaacctgagtctggaacagccaaccccgtgaggctatttccccaggggcggggtctggggggaggcacagaactaccaagatggagtctcgaaccccatggagttggggatggttagtggtgtggtctctgga

SEQ ID NO: 2995 - DNA, 256 bp, homo sapiens
  misc_feature (2)..(128): n=unknown
anggggaggaagagaaggcgttggtcttgcagtcttgtcttaggggtgtggggagtgggggannnnnnnnnnnnnnnnnnnnnnnnnnnnnnnnnnnnnnnnnnnnnnnnnnnnnnnnnnnnnnnnnnaggatatagctatttttcttcctctatcaaccaaatggtaagcatctattttgtagtccactctactgagctaaattatagatccagctatgctatttataattattttcttgatgaataaattttcc

SEQ ID NO: 2996 - DNA, 398 bp, homo sapiens
  misc_feature (356)..(356): n=unknown
ggctcatcctgcctgtgggtttgattgctaccactcttgcaattgctcctgtccgctttgacagggagaaggtgttccgcgtgaagccccaggatgaaaaacaagcagacatcataaaggacttggccaaaaccaatgagcttgacttctggtatccaggtgccacccaccacgtagctgctaatatgatggtggatttccgagttagtgagaaggaatcccaagccatccagtctgccttggatcaaaataaaatgcactatgaaatcttgattcatgatctacaagaagagattgagaaacagtttgatgttaaagaagatatcccaggccaggcacagctacggcaaaatacnaataattgggaaaaagattgtggcttggactgaaaagatgat

SEQ ID NO: 2997 - DNA, 590 bp, homo sapiens
acatggtgaaaatctgtgagaaactgagggttttcatttgttttctgtgccccactgtatatcacctttcaaaataatgctttctgctgggtccaaacttcacttggagcaaagaaaggtagttaaaaggtttcacttaaagctacttcgttatggtgctactgaaagtaagtaaaagcaaacagcagtaacatgggacttaaatgagcaagagaaggattcaggtgaaatagaagctgcatttggggataactgaagattgactttctgatgaaaggcacaaaaaaggattaattggcttattccaaacagagggcagttctttaggaagtatgcttgaggatatacttggcaataaatttgacagctagcatggtctctctgcacgttggctttatccgggattctggaaggagaaaaccaaatttgcctttatctcggagctcaaaggcaaatgtgtgtttgatgcccaggtcataagcccagtctaaagaagaacctgatatcgggtaaattgttgattctattgggccatagatgtagcggggttcatatcgagttgatagaacatcagtgccaatctttgcaac

SEQ ID NO: 2998 - DNA, 507 bp, homo sapiens
gcagcatcttcgaccgcgaggaccaggccagcccacgggccggcagcctggcggcgctcgagaaacggcaggccgagaagaagaaagagctgatgaaggcgcagagtctgcccaagacctcagcctcccaggcgcgcaaggccatgattgagaagctggagaaggagggcgcggccggcacgtcgacatccagaacttctcctccagctggagtgatgggatggccttctgtgccctggtgcacaacttcttccctgaggccttcgactatgggcagcttagccctcagaaccgacgccagaacttcgaggtggccttctcatctgcggagacccatgcggactgcccgcagctcctggatacagaggacatggtgcggcttcgagagcctgactggaagtgcgtgtacacgtacatccaggaattctaccgctgtctggtccagaaggggctggtaaaaaccaaaaagtctaacccctgctcggggccccacggattgctggtgga

SEQ ID NO: 2999 - DNA, 513 bp, homo sapiens
  misc_feature (75)..(233): n=unknown
  misc_feature (335)..(486): n=unknown
gggtgtcgcaacagacagggcagcggtgggcggacgcacaggcaggagacggtgcccggagagtgggggcggcancttgccactggctggccatgcgggcgggcaggctagacattcttgccgcgcaggcgcagttcgtngcgtcgcangtggttntagagcgactnnacataggtgaagacacacttgnggtcaggcttcttgcccatnatcatcatgtngtccanctcnancaggggcacacagtccaccagcatccgtggggccccgagcaggggttaggactttttggtttttaccagccccttctggaccagacagcgggtaagaattcntggatgtnacgtgtacangganttccagtcaagntctcgaagccgnaccatgtcctctgtatccaggagctgcgggcagtccgcatgggtctccgcagatgagaaggcnncctcgaagttctggcgtcggttctgagggntaagntggccnatagtcgaaggcctcagggaagaagtt

SEQ ID NO: 3000 - DNA, 466 bp, homo sapiens
caagaaagcattttctcgccagaacatcgagaaaaagatgaacaagctggggacaaagatcgtatctgtagagaggagagagaagattaagaaatctctcacgtcaaatcaccagaaaatatcctcaggaaaaagctcccccttcaaggtttctcccctcactttcgggcggaagaaagtccgagagggagaaagccatgcagaaaatgagaccaagtcagaagacctgcctagcagtgagcagatgccaaatgaccaggaagaggagtcctttgcagagggtcattccgaagcgtccctcgccagcgctctggtggaaggggaaattgcagaggaggctgctgagaaggcgacctccagggggagtaactcggggatggacagcaacatcgacttgactattgtggaagatgaagaggaggagtcagtggccctggaacaggcacagaaggtacgctatgagggt

SEQ ID NO: 3001 - DNA, 515 bp, homo sapiens
  misc_feature (422)..(422): n=unknown
ttaacactataaaatgtttattattaaaaatattagaaaataaaaatattttgaagatgacatgttattccaggatatacgaacttctttagtatttttatttaaagagtgaaatagttaagctactattgtaagtattttactttcaagcacatacattttttctctgttttcattcttttcggcattctttgtttcctgtttctctcattttccaaattttctttcttactttttgaatagtcctgactttactacgtatcttacttcattagctgacttttataatctcttcatttttccttcgtttgcaataaaacaatggtttctagcaagtaaacaaccaactgatcatctctttttacctttcgtagatgttttctcttaaaacatatagtatatgtttagctacatatttatgnatatatatatccacacttaaagaataataattaggattcacagagtacggtgggaataccatatattaccgggacactattcagcaagcttat

SEQ ID NO: 3002 - DNA, 406 bp, homo sapiens
caagatgggcttgaaaggccctttgaagaccccaatagcagccggtcacccatctatgaatttactgctgcgcaaaacatttgacctttacgcgaatgtccgaccatgtgtctctatcgaaggctataaaaccccttacaccgatgtaaatattgtgaccattcgagagaacacagaaggagaatacagtggaattgagcatgtgattgttgatggagtcgtgcagagtatcaagctcatcaccgagggggcgagcaagcgcattgctgagtttgcctttgagtatgcccggaacaaccaccggagcaacgtcacggcggtgcacaaagccaacatcatgcggatgtcagatgggctttttctacaaaaatgcagggaagttgccagaaagtgtaaagatattaaa

SEQ ID NO: 3003 - DNA, 399 bp, homo sapiens
gcaagcactgcctgtaaagccctcgcatgagaggccagcctgctagggaaatccaggaatctgcaacaaaaacgatgacagtctgaaatactctctggtgccaacctccaaattctcgtctgtcacttcagacccccactagttgacagagcagcagaatttcaactccagtagacttgaatatgcctctgggcaaagaagcagagctaacgaggaaagggatttaaagagtttttcttgggtgtttgtcaaacttttattccctgtctgtgtgcagaggggattcaacttcaatttttctgcagtggctctgggtccagccccttacttaaaggtaagttgtaataaatttacggcattatcctaattgcattgttaagctgatttgcgtgatctgat

SEQ ID NO: 3004 - DNA, 544 bp, homo sapiens
  misc_feature (535)..(535): n=unknown
taagcacaacctacattattgctttattttagaaaagagagccagaaatggtagtacattataatatgagttaccataatctctttagctctttaattctcttctcccatttttgcttttgtaaataagacattatcaagaattagagaaattttaggtctatgtgtgagcatcttaacaaatgatagtaggaggcaaaaaataattagttataaagctgtaaaagggaaccaagaaagggaaaataatcgcaataacttaaaaataatcaaacaagaatatagtataaaaggagaaattttcctaccttttggaaaagcaaaaagttccgtttctacattgctgttaggctcaggagattgaataactttagataatttaaacatggaaaacatacaaattatttgatttgaaattttttttaaaaactaccttctttatagtttatttcatatatgtaataaagtacttctacaaaacacatttcaggattcaggcttcactaagatctggatgctactgaggcgtcaacagntccacattt

SEQ ID NO: 3005 - DNA, 474 bp, homo sapiens
  misc_feature (381)..(381): n=unknown
cgcccgagcttctgcagctcctgccaccagacagtcctaccagcgctgtggacatcttctctgcaggctgcgtgttctactacgtgctttctggtggcagccacccctttggagacagtctttatcgccaggcaaacatcctcacaggggctccctgtctggctcacctggaggaagaggtccacgacaaggtggttgcccgggacctggttggagccatgttgagcccactgccgcagccacgcccctctgccccccaggtgctggcccaccccttcttttggagcagagccaagcaactccagttcttccaggacgtcagtgactggctggagaaggagtccgagcaggagcccctggtgagggcactggaggcgggangctgcgcagtggtccgggacaactggcacgagcacatctccatgccgctgcagacagatctgagaaagttccggtcctataaaggggacatca

SEQ ID NO: 3006 - DNA, 123 bp, homo sapiens
  misc_feature (80)..(80): n=unknown
tgattctgaggccagccacaggctcagctcttcagtgagccagcacggagaccatctgtgtggcatccagcccacctcanctccctgtggccccagggcatggcctcctggctctgagtctgg

SEQ ID NO: 3007 - DNA, 219 bp, homo sapiens
  misc_feature (21)..(21): n=unknown
  misc_feature (193)..(215): n=unknown
agctcacagccccaaatatcnatctttctctggaccaaagtgaaggatctattctctctgatgataacttggacagtccagatgaaattgacatcaatgtggatgaacttgatacccccgatgaagcagattcttttgagtacactggccatgaagatcccacagccaacaaagattctggccaagagtcagnntntatnccagaanatacggnngaag

SEQ ID NO: 3008 - DNA, 570 bp, homo sapiens
acatttgaataattttcatgtgtcatgaaatattcaaaaaaaatttttccaacccaaaatgtaaaaaccattcttagcttgcagtggtgagcgagacttagctgtggtttgccaccccacctcactagaggcctacagacttgaaatcttgttggcattttaaagggcatatgaagactataaaggaaatattttgtacatgaaagtaatactcatatttaattttaagcctatgatcagattacggtgttttaaagcagatcactttttataatgcatgcgagagaggaattcatgaataactgaatgctaccaaatgatttttgagtaggccaccttgcacttgagttcttggcacttaaaaggtaacctctggagctgagtttatggcctgaaactcagagagctaccaaacatgcaacacggattcttaaatttcacaatgtggtggtcaccaacattcatcaggaaaatgatgttaaaagaccaatttacataaaatataatgcccaatttgacaactaaaataaagttgacgtggattagaaagcccggcttccctttgagaag

SEQ ID NO: 3009 - DNA, 254 bp, homo sapiens
gacctgagtggatggacactgcctcttagaactagaacttagaactttatcttgaaaatgtaccactgttgcagaagctcctcacagagtatgtgtcaggcatttttaacctgctaaaggcaagaagaagtgtttaccacatagttgcaaaggtcttcaacttgccacagccaacagaaaaatcaaaatgattgaaccctttgggaatcagtatattgtggccaggccagtgtattctacaaatgcttttgagg

SEQ ID NO: 3010 - DNA, 463 bp, homo sapiens
  misc_feature (451)..(451): n=unknown
agagatgacactgactgggcccatcaggacagtgctcaggctggagaagtggatcacaccttgttgggacaatgcacaggtgccggctacttcatgcagttcagcaccagctcggggtccgcggaagaggcagccctactggagtctcggattctttacccaaagaggaagcagcagtgcctgcaatttttctataaaatgacgggaagtccttcagacagactcgttgtctgggtcaggagggatgacagcacaggcaatgttcgcaagttggtgaaggtgcagacttttcaaggagatgatgaccacaattggaaaattgcccatgtggtgctcaaagaggaacagaagtttcgctaccttttccagggcacaaaaggcgaccctcagaactcaactgggggaatttacctagatgacatcactctgacagaaaccccctgccccacangggtctggacag

SEQ ID NO: 3011 - DNA, 353 bp, homo sapiens
  misc_feature (124)..(323): n=unknown
acaagtgatttacaatgaagtgtgatgagtgttgtcacaggacacactagatacattaggagcacatagcaaagtaacataattatgtggggcagagagatgacaagggtcacacatggggctngangccntagtccttngangtcctatncnaagcnaaggntnttaaaaaanttnccccaaattgnnttnancatgggaaanttaaggcntnnntggaggaggtnctgctgtggtctggccaatgccagnaggnaggtnacttccttggcctttgggaaaggatggcgatgatggagaaggtcaagaagatcacgccagcnatgcctccgatcaccatgcccaggacactg

SEQ ID NO: 3012 - DNA, 22 bp, homo sapiens
cggagacaggctatgagtctga

SEQ ID NO: 3013 - DNA, 22 bp, homo sapiens
gccagcaacctacatgaacttg

SEQ ID NO: 3014 - DNA, 22 bp, homo sapiens
cgacatgctgggagattacatc

SEQ ID NO: 3015 - DNA, 19 bp, homo sapiens
tgagtctgggcagctgtcc

SEQ ID NO: 3016 - DNA, 21 bp, homo sapiens
catcaggttggagtgcgtctt

SEQ ID NO: 3017 - DNA, 20 bp, homo sapiens
ggatcagccctgaactcact

SEQ ID NO: 3018 - DNA, 21 bp, homo sapiens
agacaaggatgccgtggataa

SEQ ID NO: 3019 - DNA, 27 bp, homo sapiens
tcaatatagatgattgtgccatcttct

SEQ ID NO: 3020 - DNA, 23 bp, homo sapiens
tgcaaagtctttgactccttgct

SEQ ID NO: 3021 - DNA, 26 bp, homo sapiens
gtccaaagagttacttgcaacagtct

SEQ ID NO: 3022 - DNA, 20 bp, homo sapiens
ggcatggtttaggccctgtt

SEQ ID NO: 3023 - DNA, 22 bp, homo sapiens
ccaagatgcagaggttgatgaa

SEQ ID NO: 3024 - DNA, 24 bp, homo sapiens
ccgtttatgggtagacatctttgg

SEQ ID NO: 3025 - DNA, 19 bp, homo sapiens
gccatgccagcctttctgt

SEQ ID NO: 3026 - DNA, 22 bp, homo sapiens
agctagaagggctggagaatgc

SEQ ID NO: 3027 - DNA, 25 bp, homo sapiens
ggtacaaattatttggctcgacttc

SEQ ID NO: 3028 - DNA, 21 bp, homo sapiens
tgatgcaatcacacgggaact

SEQ ID NO: 3029 - DNA, 25 bp, homo sapiens
catggcatggttagaagctctatct

SEQ ID NO: 3030 - DNA, 23 bp, homo sapiens
cgttctctccattgcttgttagc

SEQ ID NO: 3031 - DNA, 21 bp, homo sapiens
tcaagggagccaagagctctt

SEQ ID NO: 3032 - DNA, 20 bp, homo sapiens
gacagcaaggtgccctcagt

SEQ ID NO: 3033 - DNA, 22 bp, homo sapiens
tgtctgcgaagaaggctaggag

SEQ ID NO: 3034 - DNA, 20 bp, homo sapiens
tcaagatccgtgctcgcagt

SEQ ID NO: 3035 - DNA, 22 bp, homo sapiens
gttcagcgtacatccggagact

SEQ ID NO: 3036 - DNA, 19 bp, homo sapiens
ttgtcatccgtcttctgac

SEQ ID NO: 3037 - DNA, 20 bp, homo sapiens
cgtaagcagtatggctccaa

SEQ ID NO: 3038 - DNA, 22 bp, homo sapiens
acccaaactccacaaagccatt

SEQ ID NO: 3039 - DNA, 22 bp, homo sapiens
cccttccaagtaagtccaacga

SEQ ID NO: 3040 - DNA, 22 bp, homo sapiens
gacagtcacagcagccttgaca

SEQ ID NO: 3041 - DNA, 21 bp, homo sapiens
tgcagatcctgaggatgctac

SEQ ID NO: 3042 - DNA, 22 bp, homo sapiens
gtggaggacagaaagccaagtg

SEQ ID NO: 3043 - DNA, 21 bp, homo sapiens
tggctctcggtttctctgctt

SEQ ID NO: 3044 - DNA, 20 bp, homo sapiens
tggcttgatcaagggcctta

SEQ ID NO: 3045 - DNA, 22 bp, homo sapiens
agaagagctgccaggaagtgtt

SEQ ID NO: 3046 - DNA, 21 bp, homo sapiens
tggaaaacagcaaaccacctt

SEQ ID NO: 3047 - DNA, 21 bp, homo sapiens
ttctgaggcattaagccagca

SEQ ID NO: 3048 - DNA, 21 bp, homo sapiens
tgaagtcaaactgccacattc

SEQ ID NO: 3049 - DNA, 20 bp, homo sapiens
tgagaactgcggctgttctg

SEQ ID NO: 3050 - DNA, 23 bp, homo sapiens
agaggctttgtcactcagcaaga

SEQ ID NO: 3051 - DNA, 24 bp, homo sapiens
ctggactgctacctttcaaagctt

SEQ ID NO: 3052 - DNA, 22 bp, homo sapiens
cgaggcgatgacatagttcaca

SEQ ID NO: 3053 - DNA, 20 bp, homo sapiens
ttgtccctgtccctctctct

SEQ ID NO: 3054 - DNA, 20 bp, homo sapiens
tgaagtccacctgggcatct

SEQ ID NO: 3055 - DNA, 23 bp, homo sapiens
cacgtttatgagttgaacttctc

SEQ ID NO: 3056 - DNA, 18 bp, homo sapiens
tcaaggcacgggttgctt

SEQ ID NO: 3057 - DNA, 27 bp, homo sapiens
attagtaaacattttgtcatgcagcat

SEQ ID NO: 3058 - DNA, 23 bp, homo sapiens
tggctctaggtgtccactaaagg

SEQ ID NO: 3059 - DNA, 20 bp, homo sapiens
tcgtctcaggcttcctgctt

SEQ ID NO: 3060 - DNA, 24 bp, homo sapiens
tgttggagtatacgtgtggacatg

SEQ ID NO: 3061 - DNA, 22 bp, homo sapiens
gcaatgagctaagagccaacct

SEQ ID NO: 3062 - DNA, 21 bp, homo sapiens
gaacgtcctgttgcgagtctt

SEQ ID NO: 3063 - DNA, 20 bp, homo sapiens
cactctggcaacgggtcact

SEQ ID NO: 3064 - DNA, 23 bp, homo sapiens
gaggtcacagccgactttaaacc

SEQ ID NO: 3065 - DNA, 25 bp, homo sapiens
acactctgatgattcccacgaacta

SEQ ID NO: 3066 - DNA, 21 bp, homo sapiens
cacaggacagggatggagaag

SEQ ID NO: 3067 - DNA, 26 bp, homo sapiens
ttgacagtgtgtttatgtggaatgtt

SEQ ID NO: 3068 - DNA, 21 bp, homo sapiens
gtaggcgcacaccttcatctc

SEQ ID NO: 3069 - DNA, 22 bp, homo sapiens
atggactgaagctgttgttgcc

SEQ ID NO: 3070 - DNA, 20 bp, homo sapiens
gggatacagggtttcaacga

SEQ ID NO: 3071 - DNA, 22 bp, homo sapiens
tgaccatttacccaccacaggt

SEQ ID NO: 3072 - DNA, 19 bp, homo sapiens
gtgggcacctttgattcct

SEQ ID NO: 3073 - DNA, 20 bp, homo sapiens
agcacctcctgcttgcttat

SEQ ID NO: 3074 - DNA, 23 bp, homo sapiens
gccaggatgaacacgtacatgta

SEQ ID NO: 3075 - DNA, 22 bp, homo sapiens
tgtcaggtctgcgaaacttctt

SEQ ID NO: 3076 - DNA, 20 bp, homo sapiens
tgaacggcgtggattcaata

SEQ ID NO: 3077 - DNA, 22 bp, homo sapiens
tccttctcagccaggtacacaa

SEQ ID NO: 3078 - DNA, 22 bp, homo sapiens
gcaccatttcctgagacttgct

SEQ ID NO: 3079 - DNA, 19 bp, homo sapiens
cgcggaagacgctgttatt

SEQ ID NO: 3080 - DNA, 20 bp, homo sapiens
tggtcacgtttcggtttcat

SEQ ID NO: 3081 - DNA, 21 bp, homo sapiens
tccacatgaccagactctcca

SEQ ID NO: 3082 - DNA, 21 bp, homo sapiens
cagagcagatgccaagcctaa

SEQ ID NO: 3083 - DNA, 19 bp, Homo sapiens
tgcatggagttgctgctgt

SEQ ID NO: 3084 - protein, 23 aa, homo sapiens
CKIEQALAQTGSVAAAPQEALSN

SEQ ID NO: 3085 - protein, 23 aa, homo sapiens
CKIELPRDARKETVESHFRDLSN

SEQ ID NO: 3086 - protein, 23 aa, homo sapiens
CKIEDLLDKDPYSFGRTTIALSN

SEQ ID NO: 3087 - protein, 23 aa, homo sapiens
CKIERGHREDFRFASQRNQTLSN

SEQ ID NO: 3088 - protein, 23 aa, homo sapiens
CKIEHAPFPAAHPASRSFPDLSN

SEQ ID NO: 3089 - protein, 23 aa, homo sapiens
CKIERLQARGGPSPLKSNSDLSN

SEQ ID NO: 3090 - protein, 13 aa, homo sapiens
VTDQNDHKPKFTQ

SEQ ID NO: 3091 - protein, 14 aa, homo sapiens
DANDNAPMFDPQKY

SEQ ID NO: 3092 - protein, 13 aa, homo sapiens
DVNEAPVFVPPSK

SEQ ID NO: 3093 - protein, 14 aa, homo sapiens
DVNDHGPVPEPRQI

SEQ ID NO: 3094 - protein, 12 aa, homo sapiens
RDWVVAPISVPE

SEQ ID NO: 3095 - protein, 20 aa, homo sapiens
YTLTIQATDMDGDGSTTTAV

SEQ ID NO: 3096 - protein, 15 aa, homo sapiens
VENKFGSIRQTYTLD

SEQ ID NO: 3097 - protein, 15 aa, homo sapiens
GLPANQTAVLGSDVE

SEQ ID NO: 3098 - protein, 15 aa, homo sapiens
GLPANQTAILGSDVE

SEQ ID NO: 3099 - protein, 16 aa, homo sapiens
PYVTVLKTAGANTTDK

SEQ ID NO: 3100 - protein, 17 aa, homo sapiens
PYVTVLKSWISESVEAD

SEQ ID NO: 3101 - protein, 16 aa, homo sapiens
PYVTVLKSWISEVEAD

SEQ ID NO: 3102 - protein, 17 aa, homo sapiens
KQPSSQDALQGRRALLR

SEQ ID NO: 3103 - protein, 18 aa, homo sapiens
PAGSIEAQAVLQVLEKLK

SEQ ID NO: 3104 - protein, 17 aa, homo sapiens
KSLQSKDEQQQLDFRRE

SEQ ID NO: 3105 - protein, 18 aa, homo sapiens
EIKNSFKNNYEKALKQYN

SEQ ID NO: 3106 - protein, 18 aa, homo sapiens
DYRDWTDTNYYSEKGFPK

SEQ ID NO: 3107 - protein, 15 aa, homo sapiens
MASPSRRLQTKPVIT

SEQ ID NO: 3108 - protein, 15 aa, homo sapiens
MNHIVQTFSPVNSGQ

SEQ ID NO: 3109 - protein, 15 aa, homo sapiens
MSHTVQTFFSPVNSG

SEQ ID NO: 3110 - protein, 15 aa, homo sapiens
EMLKEEQEVAMLGGP

SEQ ID NO: 3111 - protein, 15 aa, homo sapiens
EMLKEEHEVAVLGGP

SEQ ID NO: 3112 - protein, 15 aa, homo sapiens
KSRDRKMVGDVTGAQ

SEQ ID NO: 3113 - DNA, 910 bp, homo sapiens
ccacgcgtccgcggacgcgtggggaattattggttgggggaaacccacgaggggacgcggccgaggagggtcgctgtccacccgggggcgtgggagtgaggtaccagattcagcccatttggccccgacgcctctgttctcggaatccgggtgctgcggattgaggtcccggttcctaacggtgggatcggtgtcctcgggatgagatttggcgtttcctcggggctttggtgggatcggtgtcctcaggatgagatttagggtttcctcggggctttcgggatcttcacctaatatccggactgcaagatggaggaaggcgggaacctaggaggcctgattaagatggtccatctactggtcttgtcaggtgcctggggcatgcaaatgtgggtgaccttcgtctcaggcttcctgcttttccgaagccttccccgacataccttcggactagtgcagagcaaactcttccccttctacttccacatctccatgggctgtgccttcatcaacctctgcatcttggcttcacagcatgcttgggctcagctcacattctgggaggccagccagctttacctgctgttcctgagccttacgctggccactgtcaacgcccgctggctggaaccccgcaccacagctgccatgtgggccctgcaaaccgtggagaaggagcgaggcctgggtggggaggtaccaggcagccaccagggtcccgatccctaccgccagctgcgagagaaggaccccaagtacagtgctctccgccagaatttcttccgctaccatgggctgtcctctctttgcaatctgggctgcgtcctgagcaatgggctctgtctcgctggccttgccctggaaataaggagcctctagcatgggccctgcatgctaataaatgcttctt

SEQ ID NO: 3114 - protein, 189 aa, homo sapiens; identical to SEQ ID NO: 50
